(19) United States
(12) Patent Application Publication
(10) Pub. No.: US 2003/0186277 A1
(43) Pub. Date: Oct. 2, 2003

(54) Diagnosis of known genetic parameters within the mhc

(76) Inventors: Alexander Olek, Berlin (DE); Christian Piepenbrock, Berlin (DE); Kurt Berlin, Stahnsdorf (DE)

Correspondence Address: KRIEGSMAN & KRIEGSMAN, 665 FRANKLIN STREET, FRAMINGHAM, MA, 01702, US

(21) Appl. No.: 10/312,841

(22) PCT Filed: Jun. 29, 2001
(86) PCT No.: PCT/IB01/01501

(30) Foreign Application Priority Data
Jun. 30, 2000 (DE) 100 32 529.7

(51) Int. Cl. C12Q 1/68; C07H 21/04; C07K 14/00

(52) U.S. Cl. 435/6; 530/350; 536/24.3

(57) ABSTRACT

The present invention describes nucleic acids for the diagnosis of a set of genetic parameters within the major histocompatibility complex (MHC), comprising a segment that is inversely complementary or identical to a chemically pretreated genomic DNA and that is at least 20 base pairs long as well as a set of oligomer probes (oligonucleotides and/or PNA oligomers), which serve for the detection of the cytosine methylation state in nucleic acids. These probes are particularly suitable for the diagnosis of genetic parameters within the MHC.

[0001] The present invention concerns nucleic acids, oligonucleotides, PNA oligomers and a method for the diagnosis of important genetic parameters within the major histocompatibility complex (MHC).

[0002] The levels of observation that have been well studied in molecular biology according to developments in methods in recent years include the genes themselves, the transcription of these genes into RNA and the translation to proteins therefrom. During the course of development of an individual, which gene is turned on and how the activation and inhibition of certain genes in certain cells and tissues are controlled can be correlated with the extent and nature of the methylation of the genes or of the genome. In this regard, pathogenic states are expressed by a modified methylation pattern of individual genes or of the genome.

[0003] The major histocompatibility complex (MHC) describes a group of genes with immunological and non-immunological functions and is found in all vertebrates (“Both man & bird & beast”: comparative organization of MHC genes. 1995, Trowsdale J, Immunogenetics; 41: 1-17; Evolving views of the major histocompatibility complex. 1997, Gruen J R and Weissman S M, Blood; 90: 4252-4265). In humans, it extends over a region of 3.6 million base pairs on the short arm of chromosome 6 (6p21.3) and basically participates in the immune response. It has been completely sequenced, it is highly polymorphic and it has the highest gene density in the entire human genome. Thus, of the total 3500 genes estimated on chromosome 6, 224 identified gene loci are ascribed to the MHC, which means that 3 times as many genes are localized in the region of the MHC as would be expected on the basis of its size. The MHC is subdivided into three regions: class 1, 2 and 3. All genes of class 1 are between 3 and 6 kb in size. They are present on each cell and are denoted transplantation antigens, i.e., they are responsible for the rejection of foreign tissue. Genes of class 2 are between 4 and 11 kb in size. The gene products participate in the interaction between cells which are required for the immune response. Class 3 has the highest gene density. Genes that are not involved in the immune system as well as complement factors which interact with antibody-antigen complexes as components of the serum are both localized here.

[0004] The primary immunological function of MHC molecules consists of binding antigenic peptides to the surfaces of cells; this serves for the recognition of antigen-specific T-cell receptors of lymphocytes. T-cells are important in that they are closely associated with intracellular infections and tumors. Since MHC molecules play a central role in the regulation of the immune response, they probably also have a decisive role in the monitoring of and susceptibility to diseases. It is assumed that the MHC is associated with genetic disorders such as rheumatoid arthritis (The association of HLA-DM genes with rheumatoid arthritis in Eastern France. 2000, Toussirot E et al., Hum Immunol; 61(3):303-308), Diabetes (In vivo evidence for the contribution of human histocompatibility leukocyte antigen (HLA)-DQ molecules to the development of diabetes. 2000, Wen L et al., J Exp Med; 191(1):97-104), particularly type I diabetes (The aetiology of Type I diabetes. 1999, Chowdhury T A, Mijovic C H, Barnett A H, Baillieres Clin Endocrinol Metab.; 13(2): 181-195), and insulin-dependent diabetes mellitus (IDDM) (Identification of a new susceptibility locus for insulin-dependent diabetes mellitus by ancestral haplotype congenic mapping. 1995, Ikegami H, Makino S, Yamoto E, Kawaguchi Y, Ueda H, Sakamoto T, Takekawa K, Ogihara T, J Clin Invest.; 96(4):1936-1942), heredeitary hemochromotosis (Haemochromatosis in the new millennium. 2000, Powell L W et al., J Hepatol;32(1 Suppl):48-62), particularly genetic hemochromatosis (GH) (HFE codon 63/282 (H63D/C282Y) dimorphism in German patients with genetic hemochromatosis. 1998, Gottschalk R, Seidl C, Loffler T, Seifried E, Hoelzer D, Kaltwasser J P, Tissue Antigens; 51 (3):270-275) and the mild form of hemochromatosis (HFE mutations analysis in 711 hemochromatosis probands: evidence for S65C implication in mild form of hemochromatosis. 1999, Mura C, Raguenes O, Ferec C, Blood; 93(8):2502-2505), schizophrenia (Schizophrenia, rheumatoid arthritis and natural resistance genes. 1997, Rubinstein G, Schizophr Res; 25(3):177-181), HIV (The human immunodeficiency virus type 1 (HIV-1) Vpu protein interferes with an early step in the biosynthesis of major histocompatibility complex (MHC) class I molecules. 1997, Kerkau T et al., Exp Med; 185(7):1295-1305), Myositis (Mapping of a candidate region for susceptibility to inclusion body myositis in the human major histocompatibility complex. 1999, Kok C C et al. Immunogenetics; 49(6):508-516), psoriasis (Localization of Psoriasis-Susceptibility Locus PSORS1 to a 60-kb Interval Telomeric to HLA-C. 2000; Nair R P et al., Am J Hum Genet Jun; 66(6):1833-1844), systemic lupus erythematosus (The genetics of systemic lupus erythematodes. 1999, Lindqvist A K, Alarcon-Riquelme M E; Scand J Immunol; 50(6):562-571), IgA nephropathy (Evidence for genetic factors in the development and progression of IgA nephropathy. 2000, Hsu Si et al., Kidney Int; 57(5):1818-1835. Review), hypertension (Possible influence of genes located an chromosome 6 within or near to the major histocompatibility complex on development of essential hypertension. 2000, Vidan-Jeras B et al., Pflugers Arch; 439 (3 Suppl):R6062), Behcet disease (The critical region for Behcet disease in the human major histocompatibility complex is reduced to a 46-kb segment centromeric of HLA-B, by association analysis using refined microsatellite mapping. 1999, Ota M et al., Am J Hum Genet; 64(5):1406-1410), Gee-Heubner-Herter-Thaysen disease (CTLA-4 gene polymorphism is associated with predisposition to coeliac disease. 1998, Djilali-Saiah I et al., Gut; 43(2):187-189), Myasthenia gravis, spondyloarthropathy (Genes in the spondyloarthropathies. 1998, Wordsworth P., Rheum Dis Clin North Am; 24(4):845-863. Review), tuberculosis (Differential T cell responses to Mycobacterium tuberculosis ESAT6 in tuberculosis patients and healthy donors. 1998, Ulrichs T et al., Eur J Immunol; 28(12):3949-3958), hypertrophic cardiomyopathy (Mutations in the cardiac troponin I gene associated with hypertrophic cardiomyopathy. 1997, Kimura A., Nat. Genet. 16(4):379-382), Basedow's [Graves'] disease (Iodide, cytokines and TSH-receptor expression in Graves' disease. 1996, Schuppert et al., Exp Clin Endocrinol Diabetes. 104 (Suppl 4:68-74), juvenile rheumatoid arthritis (HLA and T cell receptor polymorphisms in pauciarticular-onset juvenile rheumatoid arthritis. 1991, Nepom B S, Arthritis Rheum. 34(10): 1260-1267), epilepsy, idiopathic generalized epilepsy (The phenotypic spectrum related to the human epilepsy susceptibility gene EJM1. 1995, Sander T, Ann Neurol; 38(2):210-217), juvenile myoclonic epilepsy (Refined mapping of the epilepsy susceptibility locus EJM1 on chromosome 6. 1997, Sander T, Neurology. 49(3):842-847), Takayasu disease, multiple immunopathological disorders (The genetic basis for the association of the 8.1 ancestral haplotype (A1,B8,DR3) with multiple immunopathological diseases. 1999, Price P, Immunol Rev. 167: 257-274), head and neck cancer (Influence of tumour necrosis factor microsatellite polymorphisms on susceptibility to head and neck cancer. 1998; susceptibility to leprosy in humans. 1996; Lagrange P H et al., Acta Leprol; 10(1):11-27), malaria (Genetic susceptibility to malaria and other infectious diseases: from the MHC to the whole genome. 1996; Hill A V, Parasitology; 112 Suppl: 75-84, Genetic epidemiology in the study of susceptibility/resistance to malaria in the human population. 1999; Abel L, Bull Soc Pathol Exot;92(4):256-60), leishmaniasis (Genetics of host resistance and susceptibility to intramacrophage pathogens: a study of multicase families of tuberculosis, leprosy and leishmaniasis in northeastern Brazil. 1998; Blackwell J M, Int J Parasitol; 28(1):21-28), sarcoidosis (Analysis of MHC encoded antigen-processing genes TAP1 and TAP2 polymorphisms in sarcoidosis. 1999; Foley P J et al., Am J Respir Crit Care Med; 160(3):1009-1014), multiple sclerosis (DRB1-DQA1-DQB1 loci and multiple sclerosis predisposition in the Sardinian population. 1998; Marrosu M G et al., Hum Mol Genet; 7(8):1235-1237), primary biliary cirrhosis (Genetic susceptibility to primary biliary cirrhosis. 1999; Agarwal K et al., Eur J Gastroenterol Hepatol. June;11(6):603-606), nephritis (Genetic susceptibility to lupus nephritis. 1998; Tsao B P, Lupus; 7(9):585-590) and many other disorders.

[0005] There are investigations that demonstrate that the expression of MHC genes is coupled to the methylation of CpG dinucleotides, which can negatively influence transcription. This can be done directly in that the transcription factors do not bind with the DNA, or indirectly, by repressor molecules, which bind to methylated CpGs (How does DNA methylation repress transcription?, 1997; Kass S U et al., Trends Genet; 11:444-449).

[0006] Different results demonstrate the relationship between immunological disorders and methylation. The relationship between the expression of HLA-DR antigens and the methylation of the HLA-DR alpha gene was investigated in systemic lupus erythematosus, a generalized autoimmune disease (Low expression of human histocompatibility leukocyte antigen-DR is associated with hypermethylation of human histocompatibility leukocyte antigen-DR alpha gene regions in B cells from patients with systemic lupus erythematosus. 1985; Sano H et al., J Clin Invest, 76(4):1314-1322). The participation of the DNA methylation in aberrant MHC class II gene expression was investigated in patients with MHC class II deficiency syndrome (The MHC class II deficiency syndrome: heterogeneity at the level of the response to 5-azadeoxycytidine. 1990; Lambert M et al., Res Immunol. 141(2):129-140). Evidence of the regulation of MHC genes based on an epigenetic mechanism has been furnished (Methylation of class II trans-activator promoter IV: a novel mechanism of MHC class II gene control. 2000, Morris A C et al., J Immunol; 164(8):4143-4149). The expression of MHC genes is inhibited if transcription factors do not bind to the class 2 trans activator (CIITA) promotor. The inhibition here is based on the methylation of CpG dinucleotides in the pIV promotor; in contrast, inhibition of the methylation leads to a re-expression of the CIITA gene. In addition, the expression could not be stimulated in a transient transfection experiment by methylated pIV DNA. These results demonstrate an epigenetic regulation of CIITA and further allow the conclusion that this epigenetic control applies in principle to MHC class II genes.

[0007] 5-Methylcytosine is the most frequent covalently modified base in the DNA of eukaryotic cells. For example, it plays a role in the regulation of transcription, in genetic imprinting and in tumorigenesis. The identification of 5-methylcytosine as a component of genetic information is thus of considerable interest. 5-Methylcytosine positions, however, cannot be identified by sequencing, since 5-methylcytosine has the same base-pairing behavior as cytosine. In addition, in the case of a PCR amplification, the epigenetic information which is borne by the 5-methylcytosines is completely lost.

[0008] A relatively new method that in the meantime has become the most widely used method for investigating DNA for 5-methylcytosine is based on the specific reaction of bisulfite with cytosine, which, after subsequent alkaline hydrolysis, is then converted to uracil, which corresponds in its base-pairing behavior to thymidine. In contrast, 5-methylcytosine is not modified under these conditions. Thus, the original DNA is converted so that methylcytosine, which originally cannot be distinguished from cytosine by its hybridization behavior, can now be detected by “standard” molecular biology techniques as the only remaining cytosine, for example, by amplification and hybridization or sequencing. All of these techniques are based on base pairing, which is now completely utilized. The prior art, which concerns sensitivity, is defined by a method that incorporates the DNA to be investigated in an agarose matrix, so that the diffusion and renaturation of the DNA is prevented (bisulfite reacts only on single-stranded DNA) and all precipitation and purification steps are replaced by rapid dialysis (Olek, A. et al., Nucl. Acids Res. 1996, 24, 5064-5066). Individual cells can be investigated by this method, which illustrates the potential of the method. Of course, up until now, only individual regions of up to approximately 3000 base pairs long have been investigated; a global investigation of cells for thousands of possible methylation analyses is not possible. Of course, this method also cannot reliably analyze very small fragments of small quantities of sample. These are lost despite the protection from diffusion through the matrix.

[0009] An overview of other known possibilities for detecting 5-methylcytosines can be derived from the following review article: Rein, T., DePamphilis, M. L., Zorbas, H., Nucleic Acids Res. 1998, 26, 2255.

[0010] With few exceptions the bisulfite technique has been previously applied only in research (e.g. Zechnigk, M. et al., Eur. J. Hum. Gen. 1997, 5, 94-98). However, short, specific segments of a known gene have always been amplified after a bisulfite treatment and either competely sequenced (Olek, A. and Walter, J., Nat. Genet. 1997, 17, 275-276) or individual cytosine position are detected by a “primer extension reaction” (Gonzalgo, M. L. and Jones, P. A., Nucl. Acids Res. 1997, 25, 2529-2531, WO Patent 95 00669) or an enzymatic step (Xiong, Z. and Laird, P. W., Nucl. Acids. Res. 1997, 25, 2532-2534). Detection has also been described by hybridization (Olek et al., WO 99 28498).

[0011] Other publications which are concerned with the application of the bisulfite technique for the detection of methylation in the case of individual genes are: Xiong, Z. and Laird, P. W. (1997), Nucl. Acids Res. 25, 2532; Gonzalgo, M. L. and Jones, P. A. (1997), Nucl. Acids Res. 25, 2529; Grigg, S. and Clark, S. (1994), Bioassays 16,=431; Zeschnik, M. et al. (1997), Human Molecular Genetics 6, 387; Teil, R. et al. (1994), Nucl. Acids Res. 22, 695; Martin, V. et al. (1995), Gene 157, 261; WO 97 46705, WO 95 15373 and WO 45560.

[0012] Matrix-assisted laser desorptions/ionization mass spectrometry (MALDI-TOF) is a very powerful development for the analysis of biomolecules (Karas, M. and Hillenkamp, F. (1988), Laser desorption ionization of proteins with molecular masses exceeding 10000 daltons. Anal. Chem. 60: 2299-2301). An analyte is embedded in a light-absorbing matrix. The matrix is vaporized by a short laser pulse and the analyte molecule is thus transported unfragmented into the gaseous phase. The analyte is ionized by collisions with matrix molecules. An applied voltage accelerates the ions in a field-free flight tube. Ions are accelerated to varying degrees based on their different masses. Smaller ions reach the detector sooner than larger ones.

[0013] MALDI-TOF spectroscopy is excellently suitable for the analysis of peptides and proteins. The analysis of nucleic acids is somewhat more difficult (Gut, I. G. and Beck, S. (1995)), DNA and Matrix Assisted Laser Desorption Ionization Mass Spectrometry. Molecular Biology: Current Innovations and Future Trends 1: 147157.) For nucleic acids, the sensitivity is approximately 100 times poorer than for peptides and decreases overproportionally with increasing fragment size. For nucleid acids, which have a multiply negatively charged backbone, the ionization process via the matrix is essentially less efficient. The selection of the matrix plays an imminently important role in MALDI-TOF spectroscopy. Several very powerful matrices which produce a very fine crystallization have been found for the desorption of peptides. In the meantime, however, several claimed matrices for DNA have not reduced the difference in sensitivity. The difference in sensitivity, however, can be reduced by chemically modifying the DNA so that it is more like a peptide.

[0014] Phosphorothioate nucleic acids, in which the usual phosphates of the backbone are substituted by thiophosphates, can be converted into a neutrally charged DNA by simple alkylation chemistry (Gut, I. G. and Beck, S. (1995), A procedure for selective DNA alkylation and detection by mass spectrometry. Nucleic Acids Res. 23: 1367-1373). The coupling of a charge tag to this modified DNA results in an increase in sensitivity by the same amount as is found for peptides. Another advantage of charge tagging is the increased stability of the analysis in the presence of impurities that make the detection of unmodified substrates very difficult.

[0015] Genomic DNA is obtained from DNA of cells, tissue or other test samples by standard methods. This standard methodology is found in references such as Fritsch and Maniatis, eds, Molecular Cloning: A Laboratory Manual, 1989.

[0016] The object of the present invention is to present oligonucleotides and/or PNA oligomers for the detection of cytosine methylations as well as a method which is particularly suitable for the diagnosis of genetic and epigenetic parameters within the MHC.

[0017] The object is solved by nucleic acids for the diagnosis of a set of genetic parameters within the major histocompatibility complexes (MHC), comprising a segment which is at least 20 base pairs long that is inversely complementary or identical to the chemically pretreated genomic DNA according to SEQ ID-NO:1 or SEQ ID-NO:2.

[0018] One subject of the present invention is oligonucleotides for the detection of the cytosine methylation state in pretreated genomic DNA, each [oligonucleotide] comprising at least one base sequence with a length of at least 13 nucleotides, which is inversely complementary or identical to a segment of the base sequence according to SEQ ID-NO:1 or SEQ ID-NO:2, which contains at least one CpG dinucleotide.

[0019] It is preferred that the cytosine of the CpG dinucleotide is the 5^{th} to the 9^{th} nucleotide from the 5′ end of the 13-mer.

[0020] It is further preferred according to the invention that an oligonucleotide is present for each of the CpG dinucleotides from one of the [sequences] SEQ ID-NO:1 or SEQ ID-NO:2.

[0021] One subject of the present invention is PNA (peptide nucleic acid) oligomers for the detection of the cytosine methylation state in chemically pretreated genomic DNA, each [oligomer] comprising at least one PNA base sequence with a length of at least 9 nucleotides, which is inversely complementary or identical to a segment of the base sequence according to SEQ ID-NO:1 or SEQ ID-NO:2, which contains at least one CpG dinucleotide. It is preferred according to the invention that the cytosine of the CpG dinucleotide is the 4^{th} to the 6^{th} nucleotide from the 5′ end of the 9-mer. It is further preferred according to the invention that an oligonucleotide^{★} is present for each of the CpG dinucleotides from a base sequence according to SEQ ID-NO:1 or SEQ ID-NO:2. ^{★}sic; PNA oligomer?—Trans. Note.

[0022] The subject of the present invention is a set of oligomer probes for the detection of the cytosine methylation state and/or of single nucleotide polymorphisms in chemically pretreated genomic DNA, comprising at least 10 of the oligonucleotide or PNA sequences according to the invention.

[0023] The subject of the present invention is also an arrangement of different oligonucleotide and/or PNA oligomer sequences according to the invention, wherein these are bound to defined sites of a solid phase. It is preferred that these are arranged on a planar solid phase in the form of a rectangular or hexagonal lattice.

[0024] The subject of the present invention is a set of primer oligonucleotides comprising at least two oligonucleotides, each of which has a sequence that is at least 18 base pairs long and that corresponds to or is inversely complementary to the base sequences according to SEQ ID-NO:1 or SEQ ID-NO:2. It is preferable according to the invention that these do not contain a CpG dinucleotide. It is further preferred according to the invention that at least one primer is bound to a solid phase.

[0025] Another particularly preferred subject of the present invention is the use of the nucleic acids, oligonucleotides or PNA oligomers according to the invention for the diagnosis of autoimmune diseases, for the diagnosis of rheumatoid arthritis, for the diagnosis of diabetes, particularly preferred for the diagnosis of diabetes of type I diabetes or of insulin-dependent diabeted mellitus (IDDM), for the diagnosis of hereditary hemochromatosis, particularly preferred for the diagnosis of genetic hemochromatosis (GH) or the mild form of hemochromatosis, for the diagnosis of schizophrenia, for the diagnosis of multiple sclerosis, for the diagnosis of systemic lupus erythematosus, for the diagnosis of sarcoidosis, for the diagnosis of primary biliary cirrhosis, for the diagnosis of myositis, for the diagnosis of psoriasis, for the diagnosis of nephritis, for the diagnosis of cancer, particularly of head or neck cancer, for the diagnosis of IgA nephropathy, for the diagnosis of hypertension, for the diagnosis of Behcet's disease, for the diagnosis of GeeHeubner-Herter-Thaysen disease (coeliac disease), for the diagnosis of myasthenia gravis, for the diagnosis of spondyloarthropathy, for the diagnosis of tuberculosis, for the diagnosis of hypertrophic cardiomyopathy, for the diagnosis of Basedow's [Graves'] disease, for the diagnosis of juvenile rheumatoid arthritis, for the diagnosis of epilepsy, preferably idiopathic, generalized epilepsy or juvenile myoclonic epilepsy, for the diagnosis of Takayasu disease, for the diagnosis of multiple immunopathological diseases, for the diagnosis of susceptibility to leprosy, for the diagnosis of susceptibility to malaria and/or for the diagnosis of susceptibility to leishmaniasis, by analyis of methylation patterns within the MHC.

[0026] Another subject is also the use of the nucleic acids according to SEQ ID-NO:1 or SEQ ID-NO:2 according to the invention for the diagnosis of important genetic parameters within the MHC.

[0027] Another subject of the present invention is a method for the diagnosis of important genetic parameters within the MHC by analysis of cytosine methylations in sets of oligonucleotides or PNA oligomers according to one of the preceding claims^{★}, further characterized in that the following steps are conducted:

[0028] a) In a genomic DNA sample, cytosine bases that are not methylated at the 5-position are converted by chemical treatment to uracil, thymidine or another base that is unlike cytosine in its hybridization behavior;

[0029] b) fragments of this chemically pretreated genomic DNA are amplified with the use of sets of primer oligonucleotides according to the invention and a polymerase;

[0030] c) the amplified products are hybridized to a set of oligonucleotides or PNA probes according to the invention;

[0031] d) the hybridized amplified products are detected and visualized.

[0032] ^{★}sic—Trans. Note.

[0033] It is preferred according to the invention that more than ten different fragments, which are 100-2000 base pairs long, are amplified. It is further preferred that the chemical treatment is conducted by means of a solution of a bisulfite, hydrogen sulfite or disulfite. It is also particularly preferred that the polymerase is a heat-stable DNA polymerase.

[0034] It is further preferred according to the invention that the amplification is conducted by means of a polymerase chain reaction (PCR). It is also preferred that labels that are introduced on the amplified products at each position of the solid phase where an oligonucleotide sequence is found can be identified. It is further particularly preferred according to the invention that an arrangement according to the invention is used and that the solid-phase surface is comprised of silicon, glass, polystyrene, aluminum, steel, iron, copper, nickel, silver or gold. It is additionally preferred that the amplification of several DNA segments is conducted in one reaction vessel. It is also preferred according to the invention that the labels of the amplified products are fluorescence labels. It is also preferred that the labels of the amplified products are radionuclides. It is also preferred that the labels of the amplified products are removable molecular fragments with typical mass which are detected in a mass spectrometer. It is particularly preferred according to the invention that the amplified products or fragments of the amplified products are detected in the mass spectrometer. For this purpose, it is advantageous according to the invention that the generated fragments have a single positive or negative net charge for better detectability in the mass spectrometer.

[0035] It is most particularly preferred according to the invention that detection and visualization are conducted by means of matrix-assisted laser desorption/ionization mass spectrometry (MALDI) or by means of electrospray mass spectrometry (ESI).

[0036] The method is preferred wherein the genomic DNA has been obtained from a DNA sample, whereby sources for DNA include, e.g., cell lines, biopsies, blood, sputum, stool, urine, cerebrospinal fluid, tissue embedded in paraffin, for example, tissue from eyes, intestine, kidney, brain, heart, prostate, lungs, breast or liver, histological slides and all possible combinations thereof.

[0037] A method is also preferred for the diagnosis and/or prognosis of adverse events for patients or individuals, whereby these adverse events are associated with methylation patterns within the MHC. The subject of the present invention is also the use of a method according to the invention, wherein significant genetic parameters are diagnosed within the MHC. Finally, another subject of the present invention is a kit comprised of a bisulfite-containing reagent, sets of primers according to the invention for the production of amplified products, oligonucleotides and/or PNA oligomers according to the invention, as well as instructions for conducting and evaluating a method according to the invention.

[0038] The present invention thus describes a set of at least 10 oligomer probes (oligonucleotides and/or PNA oligomers), which serve for the detection of the state of cytosine methyation in chemically pretreated genomic DNA (SEQ ID-NO:1 or SEQ ID-NO:2). The diagnosis of genetic and epigenetic parameters within the major histocompatibility complex (MHC) is possible with these probes. In addition, a method is described, which is specific for the diagnosis of genetic and epigenetic parameters within the MHC.

[0039] Segments of SEQ ID-NO.1 or SEQ ID-NO:2 that are at least 20 base pairs long of the above-named chemically pretreated DNA are utilized for diagnosis. Oligonucleotides with a length of 13 nucleotides that are either inversely complementary or identical or PNA oligomers with a length of 9 nucleotides that are also either inversely complementary or identical are used as detectors for these [pretreated genomic] segments.

[0040] Both the oligonucleotides as well as the PNA oligomers contain at least one CpG dinucleotide. The cytosine of the respective CpG dinucleotide is the 5th to the 9th nucleotide as viewed from the 5′ end of the oligonucleotide. The cytosine of the CpG dinucleotide, in contrast, is the 4th to the 6th nucleotide considered from the 5′ end of the PNA oligomer. It is a decisive factor that an oligonucleotide from SEQ ID-NO:1 or SEQ ID-NO:2 is present for each of the CpG dinucleotides in the respective set of oligonucleotides or PNA oligomers.

[0041] It is also important in this respect that one must not analyze individual CpG dinucleotides, but rather the plurality of CpG dinucleotides present in the sequences for the diagnosis of genetic parameters within the MHC. In a particularly preferred variant of the method, all CpG dinucleotides present in the sequences are to be investigated.

[0042] In a preferred variant of the method according to the invention, the oligonucleotides or PNA oligomers are bound to defined sites on a solid phase.

[0043] It is preferred that different amplified products are arranged on the planar solid phase in the form of a rectangular or hexagonal lattice.

[0044] The nucleic acids, oligonucleotides or PNA oligomers are preferably used for the diagnosis of rheumatoid arthritis, diabetes, hereditary hemochromatosis, schizophrenia, multiple sclerosis, systemic lupus erythematosus, sarcoidosis, cirrhosis, myositis, psoriasis, nephritis, cancer, particularly head or neck cancer, IgA nephropathy, hypertension, Behcet's disease, GeeHeubner-Herter-Thaysen disease, myasthenia gravis, spondyloarthropathy, tuberculosis, hypertrophic cardiomyopathy, Basedow's [Graves'] disease, juvenile chronic arthritis, epilepsy, idiopathic generalized epilepsy or juvenile myoclonic epilepsy, Takayasu disease, multiple immunopathological diseases, for susceptibility to leprosy, for susceptibility to malaria and/or for susceptibility to leishmaniasis, by analyis of methylation patterns within the MHC.

[0045] Also, the nucleic acids according to SEQ ID-NO:1 or SEQ ID-NO:2, which are listed in the Appendix, are preferably used for the diagnosis of genetic and epigenetic parameters within the major histocompatibility complex (MHC).

[0046] In addition, a method for the diagnosis of important genetic parameters within the MHC by analysis of cytosine methylations and single nucleotide polymorphisms in genomic DNA samples is described. For this purpose, one proceeds by the following steps:

[0047] In the first step of the method, a genomic DNA sample is chemically treated such that cytosine bases that are not methylated in the 5′ position are converted to uracil, thymine or another base unlike cytosine in its hybridization behavior.

[0048] The genomic DNA to be analyzed is preferably obtained from the usual sources for DNA, such as, e.g., cell lines, blood, sputum, stool, urine, cerebrospinal fluid, tissue embedded in paraffin, for example, tissue from eyes, intestine, kidney, brain, heart, prostate, lungs, breast or liver, histological slides and all possible combinations thereof. The above-described treatment of genomic DNA with bisulfite (hydrogen sulfite, disulfite) and subsequent alkaline hydrolysis, which leads to a conversion of unmethylated cytosine nucleobases to uracil is preferred for this purpose.

[0049] In the second step of the method, fragments of the chemically pretreated genomic DNA are amplified with the use of primer oligonucleotides.

[0050] More than 10 different fragments, which are 100-2000 base pairs long, are preferred.

[0051] In a preferred variant of the method, the amplification is conducted by means of the polymerase chain reaction (PCR), in which a heat-stable DNA polymerase is preferably used.

[0052] It is preferred according to the invention that the amplification of several DNA segments is conducted in one reaction vessel.

[0053] In a preferred variant of the method, the set of primer oligonucleotides comprises at least two oligonucleotides, each of which has a sequence that is at least 18 base pairs long and that is identical to or is inversely complementary to a segment of the base sequences according to SEQ ID-NO:1 or SEQ ID-NO:2. The primer oligonucleotides are preferably characterized in that they do not contain a CpG dinucleotide.

[0054] It is preferred according to the invention that at least one primer is bound to a solid phase in the amplification. According to the invention it is further preferred that different oligonucleotide and/or PNA oligomer sequences are arranged on a planar solid phase in the form of a rectangular or hexagonal lattice.

[0055] The solid-phase surface is preferably comprised of silicon, glass, polystyrene, aluminum, steel, iron, copper, nickel, silver, or gold.

[0056] In the third step of the method, the amplified products are hybridized to a set of at least 10 oligonucleotide or PNA oligomer probes.

[0057] The given oligonucleotides comprise at least one base sequence with a length of 13 nucleotides, which is inversely complementary or identical to a segment of the base sequences listed in the Appendix, which contains at least one CpG dinucleotide. The cytosine of the CpG dinucleotide is the 5th to 9th nucleotide viewed from the 5′ end of the 13-mer. An oligonucleotide is present for each CpG dinucleotide.

[0058] The given PNA oligomers comprise at least one base sequence with a length of 9 nucleotides, which is inversely complementary or identical to a segment of the base sequences according to SEQ ID-NO:1 or SEQ ID-NO:2, which contains at least one CpG dinucleotide. The cytosine of the CpG dinucleotide is the 4th to 6th nucleotide viewed from the 5′ end of the 9-mer. An oligonucleotide^{★}is present for each CpG dinucleotide. ^{★}sic; PNA oligomer?—Trans note.

[0059] In the fourth step of the method, the non-hybridized amplified products are removed.

[0060] In the last step of the method, the hybridized amplified products are detected.

[0061] It is preferred according to the invention that labels that are introduced on the amplified products at each position of the solid phase where an oligonucleotide sequence is found can be identified.

[0062] It is preferred according to the invention that the labels of the amplified products are fluorescence labels.

[0063] It is preferred according to the invention that the labels of the amplified products are radionuclides.

[0064] It is preferred according to the invention that the labels of the amplified products are removable molecular fragments with typical mass, which are detected in a mass spectrometer.

[0065] According to the invention it is preferred that the amplified products, fragments of the amplified products or probes that are complementary to the amplified products, are detected in the mass spectrometer.

[0066] It is preferred according to the invention that the generated fragments have a single positive or negative net charge for better detectability in the mass spectrometer.

[0067] It is preferred according to the invention that detection and visualization are conducted by means of matrix-assisted laser desorption/ionization mass spectrometry (MALDI) or by means of electrospray mass spectrometry (ESI).

[0068] A method is also preferred for the diagnosis and/or prognosis of adverse events for patients or individuals, whereby these adverse events are associated with important genetic parameters within the MHC.

[0069] According to the invention, the use of a method for the diagnosis of important genetic parameters within the MHC is preferred.

[0070] The subject of the present invention is also a kit comprising a bisulfite-containing reagent, a set of primer oligonucleotides comprising at least two oligonucleotides, each of whose sequence is a segment at least 18 base pairs long, and [these oligonucleotides] correspond to or are complmentary to the base sequences according to SEQ ID-NO:1 or SEQ ID-NO:2 for the production of amplified products, oligonucleotides and/or PNA oligomers, as well as instructions for conducting and evaluating the described method.

[0071] The following example concerns a fragment of the HLA-A gene, in which a specific CG position is investigated for methylation.

[0072] In the first step, a genomic sequence is converted with the use of bisulfite (hydrogen sulfite, disulfite) and subsequent alkaline hydrolysis. This converted DNA serves for the purpose of detecting methylated cytosines. In the present case, the cytosines of the HLA-A gene of the length of 3201 bases are investigated. For this purpose, a defined fragment of length 874 is amplified with the specific primers TTTGGTTTTGATTTAGATTTGG and AAATAAACTCTCTAACTACTC. This amplified product serves as the sample, which is hybridized to an oligonucleotide that has previously been bound to a solid phase, for example, TAGGTCGTTTATA, whereby the cytosine to be detected is found at position 487 of the amplified product. The detection of the hybridization product is based on primers fluorescently labeled with Cy3 and Cy5, which were used for the amplification. A hybridization reaction of the amplified DNA with the oligonucleotide occurs only if a methylated cytosine has been present in this place in the bisulfite-treated DNA. Thus the methylation state of the respective cytosine to be investigated is decisive for the hybridization product.

[0073] The following examples explain the invention:

### EXAMPLE 1

### Conducting the Methylation Analysis of the DAXX Gene Localized in the MHC

[0074] The following example (FIG. 1) concerns a fragment of the DAXX gene, in which a specific CG position is investigated for methylation.

[0075] In the first step, a genomic sequence is treated with the use of bisulfite (hydrogen sulfite, disulfite) in such a way that all of the cytosines not methylated at the 5-position of the base are modified such that a base that is different with respect to its base pairing behavior is formed, whereas the cytosines that are methylated in the 5-position remain unchanged. If bisulfite is used for the reaction, then an addition occurs on the unmethylated cytosine bases. Also, a denaturing reagent or solvent as well as a radical trap must be present. A subsequent alkaline hydrolysis then leads to the conversion of unmethylated cytosine nucleobases to uracil. This converted DNA serves for the purpose of detecting methylated cytosines. In the second step of the method, the treated DNA sample is diluted with water or an aqueous solution. Preferably, a DNA desulfonation is then conducted. In the third step of the method, the DNA sample is amplified in a polymerase chain reaction, preferably with a heat-stable DNA polymerase. In the present case, cytosines of the DAXX gene are investigated. For this purpose, a defined fragment with a length of 880 bp is amplified with the specific primer oligonucleotides TTAGGTTTTGGTTTGTTGATGAG and CCCTAACTCCTCTAAACCTCA. This amplified product serves as the sample, which hybridizes to an oligonucleotide that has previously been bound to a solid phase, for example, TAAAGAGGCGGATTAGTT, with the formation of a duplex structure, whereby the cytosine to be detected is found at position 142 of the amplified product. The detection of the hybridization product is based on primer oligonucleotides fluorescently labeled with Cy3 and Cy5, which were used for the amplification. A hybridization reaction of the amplified DNA with the oligonucleotide occurs only if a methylated cytosine has been present in this place in the bisulfite-treated DNA. Thus the methylation state of the respective cytosine to be investigated is decisive for the hybridization product. In the present case, an unmethylated state is detected for the oligomer.

### EXAMPLE 2

### Conducting the Methylation Analysis of the RXRB Gene Localized in the MHC

[0076] The following example (FIG. 2) concerns a fragment of the RXRB gene, in which a specific CG position is investigated for methylation.

[0077] In the first step, a genomic sequence is treated with the use of bisulfite (hydrogen sulfite, disulfite) in such a way that all of the cytosines not methylated at the 5-position of the base are modified such that a base that is different with respect to its base pairing behavior is formed, whereas the cytosines that are methylated in the 5-position remain unchanged. If bisulfite is used for the reaction, then an addition occurs on the unmethylated cytosine bases. Also, a denaturing reagent or solvent as well as a radical trap must be present. A subsequent alkaline hydrolysis then leads to the conversion of unmethylated cytosine nucleobases to uracil. This converted DNA serves for the purpose of detecting methylated cytosines. In the second step of the method, the treated DNA sample is diluted with water or an aqueous solution. Preferably, a DNA desulfonation is then conducted. In the third step of the method, the DNA sample is amplified in a polymerase chain reaction, preferably with a heat-stable DNA polymerase. In the present case, cytosines of the RXRB gene are investigated. For this purpose, a defined fragment with a length of 385 bp is amplified with the specific primer oligonucleotides ATATTGGTAAAGGTATTAGGG and ACTTAACTCAACTCTATACCTAC. This amplified product serves as the sample, which hybridizes to an oligonucleotide that has previously been bound to a solid phase, for example, AGGTGGAACGGAATTTTT, with the formation of a duplex structure, whereby the cytosine to be detected is found at position 33 of the amplified product. The detection of the hybridization product is based on primer oligonucleotides fluorescently labeled with Cy3 and Cy5, which were used for the amplification. A hybridization reaction of the amplified DNA with the oligonucleotide occurs only if a methylated cytosine has been present in this place in the bisulfite-treated DNA. Thus the methylation state of the respective cytosine to be investigated is decisive for the hybridization product. In the present case, an unmethylated state is detected for the oligomer in illustration A and a partially methylated state is detected in illustration B.

### EXAMPLE 3

### Conducting the Methylation Analysis of the BAT5 Gene Localized in the MHC

[0078] The following example (FIG. 2^{★}) concerns a fragment of the BAT5 gene, in which a specific CG position is investigated for methylation. ^{★}sic—FIG. 3?—Trans. Note.

[0079] In the first step, a genomic sequence is treated with the use of bisulfite (hydrogen sulfite, disulfite) in such a way that all of the cytosines not methylated at the 5-position of the base are modified such that a base that is different with respect to its base pairing behavior is formed, whereas the cytosines that are methylated in the 5-position remain unchanged. If bisulfite is used for the reaction, then an addition occurs on the unmethylated cytosine bases. Also, a denaturing reagent or solvent as well as a radical trap must be present. A subsequent alkaline hydrolysis then leads to the conversion of unmethylated cytosine nucleobases to uracil. This converted DNA serves for the purpose of detecting methylated cytosines. In the second step of the method, the treated DNA sample is diluted with water or an aqueous solution. Preferably, a DNA desulfonation is then conducted. In the third step of the method, the DNA sample is amplified in a polymerase chain reaction, preferably with a heat-stable DNA polymerase. In the present case, cytosines of the BAT5 gene are investigated. For this purpose, a defined fragment with a length of 539 bp is amplified with the specific primer oligonucleotides AGAAGAGAATGTGGGTAGGA and AAAACCTACTTATCAAACCAAT. This amplified product serves as the sample, which hybridizes to an oligonucleotide that has been previously bound to a solid phase, for example i) TGAGAAAGCGGTAAAGAG or ii) ATTTAAGGCGAGGGTAAA, with the formation of a duplex structure, whereby the cytosine to be detected is found at position 211 for the oligomer TGAGAAAGCGGTAAAGAG or at position 431 for the oligomer ATTTAAGGCGAGGGTAAA. The detection of the hybridization product is based on primer oligonucleotides fluorescently labeled with Cy3 and Cy5, which were used for the amplification. A hybridization reaction of the amplified DNA with the oligonucleotide occurs only if a methylated cytosine has been present in this place in the bisulfite-treated DNA. Thus the methylation state of the respective cytosine to be investigated is decisive for the hybridization product. In the present case, a partially methylated state is detected for both oligomers in illustration A and an unmethylated state is detected for each in illustration B.

1. Nucleic acids for the diagnosis of a set of genetic parameters within the major histocompatibility complex (MHC), comprising a segment which is at least 20 base pairs long that is inversley complementary or identical to the chemically pretreated genomic DNA according to SEQ ID-NO:1 or SEQ ID-NO:2.

2. Oligonucleotides for the detection of the cytosine methylation state in pretreated genomic DNA, each comprising at least one base sequence with a length of at least 13 nucleotides, which is inversely complementary or identical to a segment of the base sequences according to SEQ ID-NO:1 or SEQ ID-NO:2, which contains at least one CpG dinucleotide.

3. The oligonucleotide according to claim 2, further characterized in that the cytosine of the CpG dinucleotide is the 5^{th} to the 9^{th} nucleotide from the 5′ end of the 13-mer.

4. A set of oligonucleotides according to claim 2, characterized in that an oligonucleotide is present for each of the CpG dinucleotides from one of [the sequences] SEQ ID-NO:1 or SEQ ID-NO:2.

5. PNA (peptide nucleic acid) oligomers for the detection of the cytosine methylation state in chemically pretreated genomic DNA, each comprising at least one PNA base sequence with a length of at least 9 nucleotides, which is inversely complementary or identical to a segment of the base sequences according to SEQ ID-NO:1 or SEQ ID-NO:2, which contains at least one CpG dinucleotide.

6. PNA oligomers according to claim 5, further characterized in that the cytosine of the CpG dinucleotide is the 4^{th} to the 6^{th} nucleotide from the 5′ end of the 9-mer.

7. A set of PNA oligomers according to claim 5, characterized in that an oligonucleotide is present for each of the CpG dinucleotides from one base sequence according to SEQ ID-NO:1 or SEQ ID-NO:2.

8. A set of oligomer probes for the detection of the cytosine methylation state and/or of single nucleotide polymorphisms in chemically pretreated genomic DNA, comprising at least 10 of the oligonucleotides or PNA sequences of claims 2 to 7.

9. An arrangement of different oligonucleotides and/or PNA oligomer sequences according to one of claims 2 to 8, characterized in that these sequences-are bound to defined sites of a solid phase.

10. The arrangement of different oligonucleotides and/or PNA oligomer sequences according to claim 9, further characterized in that these sequences are arranged on a planar solid phase in the form of a rectangular or hexagonal lattice.

11. A set of primer oligonucleotides comprising at least two oligonucleotides, each of which has a sequence that corresponds to or is inversely complementary to the base sequences according to SEQ ID-NO:1 or SEQ ID-NO:2 and is at least 18 base pairs long.

12. The set of primer oligonucleotides according to claim 11, further characterized in that these do not contain a CpG dinucleotide.

13. The set of primer oligonucleotides according to claim 11 or 12, further characterized in that at least one primer is bound to a solid phase.

14. Use of nucleic acids, oligonucleotides or PNA oligomers according to one of claims 1 to 13 for the diagnosis of autoimmune disorders by analysis of methylation patterns within the MHC.

15. Use of nucleic acids, oligonucleotides or PNA-oligomers according to one of claims 1 to 13 for the diagnosis of rheumatoid arthritis by analysis of methylation patterns within the MHC.

16. Use of nucleic acids, oligonucleotides or PNA oligomers according to one of claims 1 to 13 for the diagnosis of diabetes by analysis of methylation patterns within the MHC.

17. Use of nucleic acids, oligonucleotides or PNA oligomers according to claim 16, further characterized in that the diabetes involves type I diabetes or insulin-dependent diabetes mellitus (IDDM).

18. Use of nucleic acids, oligonucleotides or PNA oligomers according to one of claims 1 to 13 for the diagnosis of hereditary hemochromatosis by analysis of methylation patterns within the MHC.

19. Use of nucleic acids, oligonucleotides or PNA oligomers according to claim 18, further characterized in that the the hereditary hemochromatosis involves genetic hemochromatosis (GH) or the mild form of hemochromatosis.

20. Use of nucleic acids, oligonucleotides or PNA oligomers according to one of claims 1 to 13 for the diagnosis of schizophrenia by analysis of methylation patterns within the MHC.

21. Use of nucleic acids, oligonucleotides or PNA oligomers according to one of claims 1 to 13 for the diagnosis of multiple sclerosis by analysis of methylation patterns within the MHC.

22. Use of nucleic acids, oligonucleotides or PNA oligomers according to one of claims 1 to 13 for the diagnosis of systemic lupus erythematosus by analysis of methylation patterns within the MHC.

23. Use of nucleic acids, oligonucleotides or PNA oligomers according to one of claims 1 to 13 for the diagnosis of sarcoidosis by analysis of methylation patterns within the MHC.

24. Use of nucleic acids, oligonucleotides or PNA oligomers according to one of claims 1 to 13 for the diagnosis of primary biliary cirrhosis by analysis of methylation patterns within the MHC.

25. Use of nucleic acids, oligonucleotides or PNA oligomers according to one of claims 1 to 13 for the diagnosis of myositis by analysis of methylation patterns within the MHC.

26. Use of nucleic acids, oligonucleotides or PNA oligomers according to one of claims 1 to 13 for the diagnosis of psoriasis by analysis of methylation patterns within the MHC.

27. Use of nucleic acids, oligonucleotides or PNA oligomers according to one of claims 1 to 13 for the diagnosis of nephritis by analysis of methylation patterns within the MHC.

28. Use of nucleic acids, oligonucleotides or PNA oligomers according to one of claims 1 to 13 for the diagnosis of cancer by analysis of methylation patterns within the MHC.

29. Use of nucleic acids, oligonucleotides or PNA oligomers according to claim 28, further characterized in that the types of cancer involve head or neck cancer.

30. Use of nucleic acids, oligonucleotides or PNA oligomers according to one of claims 1 to 13 for the diagnosis of IgA nephropathy by analysis of methylation patterns within the MHC.

31. Use of nucleic acids, oligonucleotides or PNA oligomers according to one of claims 1 to 13 for the diagnosis of hypertension by analysis of methylation patterns within the MHC.

32. Use of nucleic acids, oligonucleotides or PNA oligomers according to one of claims 1 to 13 for the diagnosis of Behcet's disease by analysis of methylation patterns within the MHC.

33. Use of nucleic acids, oligonucleotides or PNA oligomers according to one of claims 1 to 13 for the diagnosis of Gee-Heubner-Herter-Thaysen disease (coeliac disease) by analysis of methylation patterns within the MHC.

34. Use of nucleic acids, oligonucleotides or PNA oligomers according to one of claims 1 to 13 for the diagnosis of myasthenia gravis by analysis of methylation patterns within the MHC.

35. Use of nucleic acids, oligonucleotides or PNA oligomers according to one of claims 1 to 13 for the diagnosis of spondyloarthropathy by analysis of methylation patterns within the MHC.

36. Use of nucleic acids, oligonucleotides or PNA oligomers according to one of claims 1 to 13 for the diagnosis of tuberculosis by analysis of methylation patterns within the MHC.

37. Use of nucleic acids, oligonucleotides or PNA oligomers according to one of claims 1 to 13 for the diagnosis of hypertrophic cardiomyopathy by analysis of methylation patterns within the MHC.

38. Use of nucleic acids, oligonucleotides or PNA oligomers according to one of claims 1 to 13 for the diagnosis of Basedow's [Graves'] disease by analysis of methylation patterns within the MHC.

39. Use of nucleic acids, oligonucleotides or PNA oligomers according to one of claims 1 to 13 for the diagnosis of juvenile rheumatoid arthritis by analysis of methylation patterns within the MHC.

40. Use of nucleic acids, oligonucleotides or PNA oligomers according to one of claims 1 to 13 for the diagnosis of epilepsy by analysis of methylation patterns within the MHC.

41. Use of nucleic acids, oligonucleotides or PNA oligomers according to claim 40, further characterized in that the types of epilepsy involve idiopathic generalized epilepsy or juvenile myoclonic epilepsy.

42. Use of nucleic acids, oligonucleotides or PNA oligomers according to one of claims 1 to 13 for the diagnosis of Takayasu disease by analysis of methylation patterns within the MHC.

43. Use of nucleic acids, oligonucleotides or PNA oligomers according to one of claims 1 to 13 for the diagnosis of multiple immunopathological diseases by analysis of methylation patterns within the MHC.

44. Use of nucleic acids, oligonucleotides or PNA oligomers according to one of claims 1 to 13 for the diagnosis of susceptibility to leprosy by analysis of methylation patterns within the MHC.

45. Use of nucleic acids, oligonucleotides or PNA oligomers according to one of claims 1 to 13 for the diagnosis of susceptibility to malaria by analysis of methylation patterns within the MHC.

46. Use of nucleic acids, oligonucleotides or PNA oligomers according to one of claims 1 to 13 for the diagnosis of susceptibility to leishmaniasis by analysis of methylation patterns within the MHC.

47. Use of nucleic acids according to claim 1 for the diagnosis of important genetic parameters within the MHC.

48. A method for the diagnosis of important genetic parameters within the MHC by analysis of cytosine methylations in sets of oligonucleotides or PNA oligomers according to one of the preceding claims, characterized in that the following steps are conducted:
a) In a genomic DNA sample, cytosine bases that are not methylated at the 5-position are converted by chemical treatment to uracil, thymidine or another base that is unlike cytosine in its hybridization behavior;
b) fragments of this chemically pretreated genomic DNA are amplified with the use of sets of primer oligonucleotides according to claim 11 or 12 and a polymerase;
c) the amplified products are hybridized to a set of oligonucleotide or PNA probes of claims 2 to 8;
d) the hybridized amplified products are detected and visualized.

49. The method according to claim 48, further characterized in that more than ten different fragments, which are 100-2000 base pairs long, are amplified.

50. The method according to claim 48, further characterized in that the chemical treatment is conducted by means of a solution of a bisulfite, hydrogen sulfite or disulfite.

51. The method according to claim 48, further characterized in that the polymerase is a heat-stable DNA polymerase.

52. The method according to claims 48-51, further characterized in that the amplification is conducted by means of the polymerase chain reaction (PCR).

53. The method according to one of the preceding claims 48-52, further characterized in that the labels introduced on the amplified products can be identified at any position of the solid phase where an oligonucleotide sequence is found.

54. The method according to claim 53, further characterized in that that an arrangement according to claim 9 or 10 is used and that the solid-phase surface is comprised of silicon, glass, polystyrene, aluminum, steel, iron, copper, nickel, silver or gold.

55. The method according to one of the preceding claims 48-54, further characterized in that the amplification of several DNA segments is conducted in one reaction vessel.

56. The method according to claim 53, further characterized in that the labels of the amplified products are fluorescence labels.

57. The method according to claim 53, further characterized in that the labels of the amplified products are radionuclides.

58. The method according to claim 53, further characterized in that the labels of the amplified products are removable molecular fragments with typical mass, which can be detected in a mass spectrometer.

59. The method according to one of claims 48, 49 or 53, further characterized in that the amplified products or fragments of the amplified products are detected in the mass spectrometer.

60. The method according to claim 58 or 59, further characterized in that the generated fragments have a single positive or negative net charge for better detectability in the mass spectrometer.

61. The method according to one of claims 58 to 60, further characterized in that detection and visualization are conducted by means of matrix-assisted laser desorption/ionization mass spectrometry (MALDI) or by means of electrospray mass spectrometry (ESI).

62. The method according to one of the preceding claims 48 to 51, wherein the genomic DNA has been obtained from a DNA sample, whereby sources for DNA include, e.g., cell lines, biopsies, blood, sputum, stool, urine, cerebrospinal fluid, tissue embedded in paraffin, for example, tissue from eyes, intestine, kidney, brain, heart, prostate, lungs, breast or liver, histological slides and all possible combinations thereof.

63. The method according to one of the preceding claims 48 to 62 for the diagnosis and/or prognosis of adverse events for patients or individuals, whereby these adverse events are associated with methylation patterns within the MHC.

64. Use of a method according to one of claims 48 to 63, characterized in that important genetic parameters are diagnosed within the MHC.

65. A kit comprising a bisulfite-containing reagent, sets of primers according to claim 11 or 12 for the production of amplified products, oligonucleotides and/or PNA oligomers according to one of claims 2 to 8 as well as instructions for conducting and evaluating a method according to one of claims 48 to 63.

The application's sequence listing, which the Patent Office published only in electronic form, follows.

SEQUENCE LISTING (2 sequences)

SEQ ID NO: 1 - DNA, 3673778 bp, Artificial Sequence (residues 1-1,836,889 of 3,673,778)
  chemically treated genomic DNA (Homo sapiens)
  unsure (3294164)
gattttatttatttttagttattatttgttttagatgttttttatttaaaataagtttttagtttgtgtttttggagtggaaatttatatggttattaagaaataattttaaaaatgtaatttagatatttaaaattttatgtgttatgttaatatgtaatgatggtttatattatagtattttataatgggtaagtattatttttaaagtaaaattaagttatatttgtggttgttagtgaatgcggtagaaatggattttgaagatttaggtattgttttgttttggagtaggatatttgtggttttagtaaattgtataaaggttttttttttttttaatgtatttttcgtgatattttaattattttattttattaattatttttttgtaaataaaattgaaaatattagtttataatgtgtttttatatattttgtttttatttaaatggttatgaataagtggttttttattttttattgtcgttgtaattatttgtttttgatttggtaatattttttttagtttttttttttggttatcgagattaatagtttaataagcggttttttgatttattaagtggtttaataggataacgttgatttgagttaatatttttggtatgtttattttaatttgtaatttttttttgaatttatttttataaggtgagttggaaaattgtaattataattaaagttagaaaatattggaagtagttaatatttttttttattattaaagattggtttttaatttttattattgttttattttttttagttagttaatagtagtagttgaaaagcgagagtatattgatgaagaatattgcgggtataaagaaaaggaaaagtatgtggagttttgttgtgtattttttagtttattttatttattagaacgtggcgtttttaggaattgacgttttttaggtttttagatgagggtagtgagtattttgagagttagttggattttttttttggtgtgttattgtatagttatagtttttgggtagggagttgttttgtatttttggaattatttttttggttatggtggttattgttgtattgtttttttgaggttagtgagatagggtgtttatagttttttttgaaaggaaataagagatttgttaggttgatggagagaataagttgttcgatagtgcgtaaattatattttgggtttgtggttagaatattttgtagtaaagaggtagaagagttaagggaggtatttttatatttgaggaagtttagaaatttatgaatagtgtttttgggttgatttatgtttattataatagtagtaaatataattttgagagggaagttaagatgttaatgagacgtaagatgtgtgtgttgatatgtataattatagtgtatgtacgtttaagagattatagaatatgtttaaaataatatttttttttatttatttatgaataattatgtaagattttcgtgaggggagggtattgttttttttttgagtagttgttttgattagttgttagagtgtatttttattttgtaataaatttttttgttgatttttattttggatttgtttttaaatttttttgtgtggtaaagttaagaatttgaatcggtttattggttatatttttttttttttttttttttttttgtattttgttgttagggataattttgtttttgttggtagtatgtttttgaggatggtattttgtggttggcgttttttttggtttggtttcgggttattaagtatagtttatggtaggaggttttgagaatgagtggtattgttttgtgtaacggtttttatgggagtggtttataggtgtttgtatttgtggtatttttataattgtttaaaaagatttaagaatgtattgtgggaggagagtaggtttggagatttatttgtgttttttatttgtttatttgtatggttatgtgtttgatatggttagaaatgagaaatgttgttgtttttttgtaaagtattatttagtttttttttttttgaaggtggtggtacgatgtttaggttgagatggacgtaggagttagtattttaaagtaaaaggagagattttaatagaaatatttgagttttttaatgagaatgaatagggttttttattttttggtaattgtgtattttttattgatatgttttttgtttttagaatggttttttttttttgtaggtggtttattgaaaaaggaaaggatagaaaagaaaaagtaggagaaggtgtatgggaagttgggattttggttttgtgtaggggagatataaggtgtttttggggaggttgtcgttatttggggtattggtatatggggtacggtagggttcgtttttttgatgatgtcgtttattttagttgtttatcggaagttgtagtgtttagattagttttgtattgatggaaatttaaaaaaaattatattatataattttatgttttttgaaaatagttaataaatttttatggttaagttgttagtaacggtaatttttttaatttgtttaaagacggttaaatttgtagggtttttatttttattggatatttgtgttttttgtggggtttatttttcggcggttttttttgttggttgtttttgtgattgttgatattttgtttttttggtggaaattatatttttttttgtttagtgagggttggaaaattggatgattaaattcgacgaagatagtaaataatatttgttttgcgtgggtgttattattatttgtatttgaaagtaaggttgaggtgtagaagatataaaatgtggttatgttttttggttggtaagtggtttaggggtaatgtgagtttgagtgtatgatattgtgatataggatagggtgcgttatagtgttgtttattgtgattgtagggttaaaaggaattagggttgagaggaatttggagatatgttggggtggggttaaacgagggtttggagagagtttttatttatttttatagggtttggtggagatagatcgaggaggggtatttgtttttttttttttgtagagtggaatgatagttgatgatattattttgaaagttatagtattatagagatgtttggatatttattagaggtagatttgttgtgggaaagttaaggttttggtgcggaaatttaagattttgtaaattggaatagggttattttatgggtgttttttagaattttttgggtatgtagaggaggttcgtttttttttagtaatggtttttattttttatattggaagttgttgtagaaattttatttttatgatgtagtgggaattttatttaggagttttgtagtaatagtcgttatgttttcgtaggagtttgaggagtagttttgggattggaatttaagggtgtttgattaaagggttagaattaagttggataaattaaaaaaaatatttttggtttgggagtatttttttagggtatgggtttattaaggattttagggtatggggtaaatttattgttggggtggatttatgtagattggaaaaaatgatgtttaatttttagtaagttagatatgagttagttgttttggaatatgtagaggatggataatgaggttgagggaagtgggtgtgtgggatggagatattatgtgaattagaatgtttattagggttatgttttatagaggatttatagggtatattttttattagagttttaggaatgtgttggtgagagggatttgtattgttaagaagcgtcggggtggtgttttttgtaggttgggtgtgatggtaggaaggaggttttatagttgggtttattgatatttttgaggaaagtgtggttttgaaaaggtagagaattaaatggtgatagtggtttgtaaaagttagagggtacggttaatttgataattttagaggagtagttgaggtagtttgatttgtagggagttgtggggaaggttaatagagggtggtgttagaaaagatagtagttaataagggtattgtttgatatttatgataagaaagtaagaattgatgagtagggggttgagggtgtttaatttaatataaagttatgattttatttttaatttttaaatgttaattaagttttagatttagattttagttatagagaaggagtttttattttaggaggaaggattttggaattttatggtaagtatatgttggaataattttttttgtttttttgtaaaggagtttatagttatttatttaggggattgtatattaggaaagggaaataggtagaatttgggggagtgttgatattgggtgtgagttaatattgatgtttataggtttatagtattattatgtttttagtatagtggggtttatagaagttgggaataaatttggatatattataaagagattattgggtttatagatttagttttgtttatttttttattttttaagtgtgtaattggtattgatgttttggtagttggagtaatttttatattgggttttaagtttttggaataagggttgttattttttgaaagttaaagggaaatttttgtaattgattttattttggttaaataaaaaatgatattgagttttagggtgagttttatgaaaggtgttgtaggtattgtaggtgtagtatcgttattagggagttgaaggatgaggggtgttgttggagttgtttattatttttatgtaatttagtaatttgtttttaaggaagtttgatggggtttaaagaatgaataagattattttagatttgaaaaagtaggagttataattgtagttgttatgttggttggatattacgggtagagtagattgataaggttttaggtatagagtgtgtagttgtggatttggtgagtgtatttttttttattttaatgagaaaaattatatatgaagtgatttatgtgggatttataatatatttattgataattggttttagggttattgtaattgatttgttttttatagtatagttttaagagatttgaagaatttggtattttatagaatggtaaattagtttattttattaataatattatgttgattaggatggatgagtaggaggtggaaagtatgttgaaggttttggtaaaatacgtgttttttagaagatggaagataaattatatagagatttaggagtggttattgtggtgaagttttatttatttagtggttgaggatatttaggagttttttttttatagtaaaagataaagtgttgtattttgtatttttattataaggaaggaagtatattgtttggtgagtttttttgagttttgataatattatattttatatttattgttttgatttatattttaggagaaataggaggggatttgttttaattaggtttgttgaggaaaggatattggtagatttaggttatgaggtagcgttattttttagatttatttagaggtgttagttttggggaaagatgtaggatggagttgaaataagtattagtgggggagttatatggacggtttgggattttggagtaaggttatgttatttatagtagagatatatgtttttgttagaagtaatttttggtatgttattggttttgataagatagaatttttgttatgggatagtaaataattatgtgattttaaatgtttatatgaattggtttttgtaatttagaaagttatagatcggatagattttaaagtatttattatgagatagaaatggtttatttggattgagtatgaattttatgttgatatttttagaaaatatttaaatttgaagtggtattaaataattaagtagataaattgaagttagttagtttttattatcgggtagtttaggtttagtaggatgggtttatgaatggagtaagtatagtggtagggatgaggttaaatatgggtttagaagtattgattattatttattaagatagatttagttgttgttatttttgaatgtttaatttattagtatttgaggttaatgatatgttttagtggggttatatttttttaggtgattaaagtaatattcgttgttaagtgattagttgagttatttttattttggaagggttagaggtttatttttatagggttaggtattattttatgagtgggtttttttgttttgtttttagatttttagttagtattattttttagggattgttgatatttttgatttataggtatggtattgtttttagtatattgtttttttggcggaatttatttgatagggaagtaggtgtagtatttttatggttatgggatttattggttttattattatttgtattatttagggtttgttagttattaagaatgttggataggttttttataggtataatttagtgttagtttggaggaagtattttgaggagtgggtgttgttttttaggatatggtgtatttattaaattagagatatttttatagtgtcgtgtttttagtaggaagaatatgtgggtttagaaattaaggagtgaaagtgggtatggttttatgttttattttttagatttatttgttgtgggattttgtattttttattttttaaatttgtgttttgtagggtagaaggttttggattttaaaggaaggtatttttaaattaggataaatgagagtttattgaagaatatattattattgtttttagagagatttggatagtatgtgtttagagattagtaagtgaggagtttttttttttttaggtataggtaatagattttaatttttaggaggaggttgggttgttgttataatgagggtaggaggaatgtgtgtggaatttagtgatttatttgaggggttttttggttttttttgttttattgtaagtgttagtggaattgtttagtaattaattttgagggaatttgatttttaagggtttagaaattttaggaaggaaaatttgaattatgtttttagataattttttaaggttttgtttttgtgttttgatatttttagtagtattggtgtagatattttgttttttatgggttgtttttaattagtgatgggtgataagagggatattaagggaggtttatgtttggaagataagggttaattgtgacgagaggatttttttatggttttgtttaattttcgttagattgtttatggtttaggatgtgtttaataaatttttttttttgttttttatttgggggttacgtttgtattttagtttgttgttttttttaaggttttttggatttttttttatattttttggtaggtgagttttttaataaaatattgtaattttaattttatgttatttgttttttggagaatatggattaataaaattatttttatttatatattagtgattttttatttttttagtttgtaaaatttttttttttatttaattttttttatttgttttagttttgttagtatttgtgttgttttttttgagtaaattgatgtttattgttttaagttattaagttttggggtagtttgttatatagtaatagatagttaataaattttttttatgtttcgattattttatagtggttatttatatttgatttatttttttttatttttataatattatttatatataatgtttttcgtttttttttatttattttttttttgatttttttttttttttttattatttttttttattttttatgaaatatttttaatatataaaataattttatgtggttatgatataaggaagtattttttgaatttgtatgttaaaagtttaatgttatagtgtatgggatataagtaaagaataggaagttattaatagagtttgagtaaaaagtgtttggtgtaattttgcggttaagatagtgattttgaatttttataggttgatgtaaaaataattgtagtttttgttattataataatttttattaagaattatttatattggattaaagttaattgtaatgatttatgtgatggagagagttagaatgttatgaaagtggttttgattagaaataggttatttgatttttggtttattgatatttttatagatttttggtgtataatgttcggtttgatgtgtaaggtaattttattttgtaaaggattcgatgttatattttattatatatatatttgaattaaatttttatagaattggaaatgtatattattgattaaaataaattaaataggaaaaaattatataggaataattagtgatagaatagtaaataggaatggaaaatataataggattgtttaaaaaatattgtagaagtatagaatagtagtgttatttagaattatagtgatgtttaaattatgtttattatattttattaaaaattagagcgaaagatgttaagtttattatggaatgtttatttagtagttagtttttggaaaattttgtttttaagttggagttaagtattttgggttattgtatttaattaaagttattgatattatgttaagttagatgtgttggttgaggtacgagatttatattttttttattttaaaagtaatttgatttggtaaatatttttaaagatgatatttgaatgagaaaattggtatttgggatatttttaaattaaatttgagatattttaggtaaaataaatatttatttttaaggtattattgttatggtattgaagttttggaattatttgatttagttattgtaagtttttagttgtgttgtaatttattaaagagaatattgttattaaaggtatttgtaagaaaaatttagagatattatagtattttttttttttgttttaaatttttttttttttaatatttaaggttttgtgatgttttaaattttaattattattttaaaaagagaagtttaaagtattaaagaattataattagatgaaagtagttttggatttataaaattttgaaataataattttaattttgtttttaatatatatgtaaattttttgatattttttattttgtagaggtgtaggtttattttttttttgtgagtgtggtttggatttaatgatttatttttatttgatggagtgattgttggtgtagaataaaaaatttatcgtagtttttatttttgttttttttgtttttgggattatgaattttgggggaagttagttgttgtgttataagtagatttgtggaaaggtttatgtggttaggatcgaggtttttcgggattagataataaggaattgaggttttttttaatagttatgtgagtgagttattttttatgtaaatttttagtttagttgagtttttagatgatgtagttttggttgataattggattgtaattttgtgagaggttttgagttagaaatatttagggaaattttttttggatttttgagtattggaaattgtgggagatgataaatatttgttgttttgagttgttatatttttagtaatttgtaatgtaatagtaaaaaaaaatatagttttataagagaagatgaatagttgtattttaatttttatttgttttaaatttattagtgttattgttattattattattattgagatagggttttgttttgttatttaggttgtagtgttgtggtaggaggatagtttattgtagtttcgattttttaggtttatgtgatttttttattttagttgtttgagtagttgggagtatagatatgtattattatgtttggttaaaatttttgtatttttggtagagataagggttttgttatgttgtttaggttgatttcgaatttatgaaattaagttttttgtttgattttatttttaaaagtgttgggattataggtatgagttattattatatttaatttaaattaattataaaatattaaatatgttatttggttttaagaggtaagaggaatttttatggttaaataggatgtattttattattatttataattattgttttatttgaattttaatttttatttgtgttttaattaaatttaaaagaaagatttaagttttgttaggttgattttattattttttttatgatagacgtgtaattttggttatttatttgattttagttatttaattaataataatgtaagttttgttttgaagggatttttgtatatataattaaggttttaaattaattgattttaagatagggattatttttggtcgggttgtttttatttggcgagtttttgaaaggattgggttttttttgattagagagatttatagtgtgagagggatttagtgtgagggggtttttttaatgtggattttaaaaatgaaggggttgtgtggtaaagaatgttggtgggtattaggaattgagagtagtttttttttattttgatagtaggtaaggaataggaattttagttttataattggtagaaattgaattatgtcgtttttgtataagtttgaaggaggtttttaaaatgaaaatatagttttgggaaattttaaatagagaattttttaattatgtttagatttttgattaaggaattgtaaataaataaataagtgttgtttggttaagcgtggtagtttatgtttgtaattttgaggtttgtgggaatgatataggaggattatttgtagttaggagtgagattagtttgggtaatttgaggagatttttttttttataaaaaggaattttttttttttttaatttatttgagtacggtggtatttgtttgtagttttaggtattttagatattgaggtagggggatttttagaggttaggagtttgaggttgtagggaattatgattatgtaattgtattttatcgtggataatagagggagattatgtttttaaaaataaataaataaatataataaatgggtgttgtttaaagttagtgtttgtggtaatttgttatgtagttatataaaagttatatatagatttaatagatatatggaatgaatttataaattgataagtatattatatgagtaaaataaaatattttttttttttagtattttttattttataatattttatgatgcgattaaatttttatataattatattttatttaattagttaataaaaattaatttagtgtttatgttgaattaggtatgtttttatatgtttaagtgtttgatattttagaagttttataagatcgaagtggagttattggagtgttttaggtgaagaaacgatatattttgatttatagtagtaggattattgtggagagaatatttaggtggtaggtaatggaatagtgttagagttattatttaggagtgatagagtggtggggattaagggaagaggagggtttgagggatgagagggacggagggaagggttggagaagtaggaggtgaggagaaggagtagagggatagaatttgaaagtagtagaatttttagttttaaatatattgttttataaatttttaatatatttatttatagagtttagtagggtgttttttgtatttggtttttaatattttatgtgggattgtttaaaaattaattgttttttttgtttttttttaggtttaaaaaaatattaagtgttttaataaaatatgtatattatttagatgcggatattttttaaaaataggaagtgtatgagtattggtgaggggtattgtgattgcgttgaatatttgtaattttgaggtgaatgaatgtattggtttttggttgtaatatataattatacgttgtgttattttgtattgttaggagatgttttggatttttatagaaatttagggttatggaatgaaggtaattttagaatataataagagttatagatatatagtttgggaaagtaaaatttaggagttttgagagttgtataattgtaatgtatttagatatatttatatattaaggggttaaagtaatagtttttatatataagatttttgattggtcgggcgcggtggtttatgtttgtaatcgtagtattttgggaggtcgaggcgggaggattacgaggttaggagatcgagattattttggttaatacggtgaaattcgtttttataaaaaaattagtcgggcgtggtggcgggtatttgtagttttagttattcgggaggttgaagtagaagaatggcgtgaattcgggacgtagagtttgtagtgagtcgagatcgcgttattgtattttagtttgggcggtagagagagatttcgttttaaaaaaaaaaaaaaaaaaaaaaaaaaggtttttgataatttaggggttattaagattttattatttattgtagttaataaaaaaaaaaaaaaaagaaagaaagaaattggtttttgttttattttatatgtttaggtataatttttttagagaagaagaggaggggggcggggaggagtaggaggaggaggaaagaaggaggagaaggagaaggagaaggagaaggagaggaagaggaagaggaagaagaagaagaagaagaagaagaagaagaagaagaagaagaagaagaagaagaagaagaagaagaagaagaagaagaagaagaagaagaagaagaaaaggaagaagaagaaattgtttttatatttttatttttaggataagtttattgtttggtattaagttttttggggtgaatttttttttaaaagagttcggggagtttaggtatggaatgggaggtagaaagtttaattaagggattgggatttcggaatgaataatgaagggagatggattgggtttatgtcgaaggtttttttttggttttttagttttcgggcgaagatttagggagatattgagatatattttgtataggagggggagggggagggggagggtaaagttttagggttttaggagtggtttttaagggtttaggtttcgaggcggtgtttggggttgggaggtttagtattgagaattttttatttttttagagttttttttttttttttaattcgtgttaggtttttttttttggatatttataacgcggttttattttttatttttattgggcgtcgcgtttttagagaagttaattagtgtcgtcgtagtttttaggttttaaagttttacgtatttcgcgggatttatattttttttagacgcggaggttggggttatggcgtttcgaagtttttttttgttgtttttaggggttttggttttgatcgatatttgggcgggtgagtgcggggtttagagagaaacggtttttgtggggaggagtgaggggttcgttcggtgggggcgtaggatttagggagtcgcgttcggaggagggtttggcgggttttagttttttttcgtttttaggtttttattttttgaggtattttagtatcgttgtgtcgcggttcggtcgcggggagtttcgttatatcgtcgtggagtacgtagacgatacgtaatttttgcggttcgatagcgacgtcgcgatttcgaggatggagtcgcgggagtcgtgggtggagtaagaggggtcgtagtattgggagtggattatagggtacgttaaggttaacgtatagattgatcgagtggttttgaggaatttgtttcgtcgttataattagagcgaggttggtgagtgaattcggtcgggggcgtaggttacgattattttttattcgttacggatcgttcgggttttttagagttttcggattcgaaatttatttcgaggtagcgggattcgtttagattttttattcgggagagttttaggcgtttttatttaggtttatttttagtttaggttaaaattttcgcgggttgggcggggagggggcggggttagttgggcggggttgattgcggggatcggttagggttttatattttttagggaatgaatggttgcgatatggggttcgacggacgtttttttcgcgggtattattagtacgcgtacgacggtaaggattatatttttttgaacgaggatttgcgtttttggatcgcggcggatatcgtggtttagattatttagcgtttttatgaggtagaggaatatgtagaggagtttaggatttatttggagggcgagtgtttggagttgtttcgtagatatttggagaatgggaaggagacgttatagcgcgtaggtattaggggttatgggcgttttttttattttttgtagattttttgggatggtttcgtataaggttgggaggaaagtgggtttaatgttaggatatcgttttttttttagttttgagtaggaagaatttttttggttttcgagattcggtattagagagtgattgtgagagttcgttttgttttttgggataattaagggatgaaatttttgagggaatggagggaagatagtttttggaatatcgattcgcggttttttttgagttttttaatagttttgggtttcgtgattttttttttaagttttgttttttgttttatatttaatgtgtttggggttttgattttagtttttcggtttttatttaggttagggttagaagtttttgttttttttttagagattcgaattttttaaggaataggagatttttttaggtgtttgtgtttaggttggtgtttgggttttgtgtttttttttttattttaggtgttttgtttatttttaggttggttatatgggtgttgttggggttttttatgaggagtgtaaagtgtttgaattttttgattttttttagattttttaaaggtatacgttgtttattattttatttttgattatgaggttattttgaggtgttgggttttgggtttttattttgcggagattacgttgatttggtagcgggatggggaggaatagatttaggatatagagtttgtggagattaggtttgtaggggatggaattttttagaagtgggtcgttgtggtggtgttttttggagaggaatagagatatatatgttatgtgtagtacgaggggttgttttagttttttattttgagatggggtaaggagggagatgggtaaagaggggaacgaggggttatgtttttttttagggaaagtaggagtttttttggagttttttagtagggttagggttgaggtttggagattagggttttttatttttttttttttttttagagtagtttttttagtttattatttttatcgtgggtatcgttgttggttttgttgtttttggagttgtggttattggagttgtggtcgttgttgtgatgtggaggaagaagagtttaggtaggaaggggtgaggagtggagtttgagtttttttgttttattgggggttgtaagttttaagtagaagtgtgttttgttttattattgggaagtattatttatatttatgggtttatttagtttgggttttgtgtgttagtatttatttatttgtaaagtttttgtgaaaatgaaggatagattttttatttcgatgattatggtggtgatgggatttgattttagtagttataaattataggggaaggtttttgttgatgatagattttaggagggtagttggtttaggatttatatttgttttttttatattttttgattttgttttggatttatagttatatttttttggaaatttttttgggattaaagattaggggtttgttttaggattttatggttttgttttttttttggttttttataggatattttttttttatagatagaaatagagggagttatttttaggttgtaggtaagatgaaggaggttgatttttgagattgttgggatattgtggttaggagtttatgagggagtttatttattttatagtttttttagttatatttgtgggttttgattaggttttgtttttgttttattttaattattgatagtgtttagggttttggggtgttttttatagttaataaaggtgatattttagggtaggggttttgatgtgagtggggtgttgggggggaatagaggggatttagttgtgttattgggtttttttgatttggatgttttgagtatgaaatgggttatttagagtgttattttttattgtgattgatacgaatttgtttatgaatattttttttatagtgtgagatagtttttttgtgtgggattgagaagtaagatattaatgtagtagaattgtatttgtgttttacgaatatatataaattttaaaaataaagaataaaaatatatttttttatagatataggtagatatgtttttatagtatgtacgtaaatgtgtgtgtgtgtgtgtgtgaagagaaagagtgaatagagagattaagatttttttaatggtgaaaagatatatatatatttggaattagttagtttgatttagtttaggtgattttaattttggtggtaataattaaagtatcgtagttaggagttagtcgaatatatgtttttttttttttattagattgaattagagtgttgattttggttatattaatgttataaatttttttatagtttgtttgatttggtgtttgttggttttaatatttatagtgaatataagtaggttgttgttttttattttttttatagtttatttagtggttagcggaaatttgatgataatatggtggttaagtttattttttttgggggtgtttttttaaggatatttgggttgttttcggagttatagtgttttgggtcgtcggaaggtgggtgatatgtggattttgttttttttgtggttgtggatattttttaatattgtttttttggttttgtaaagttttcgttttggtttcggttttaggaggggtaggagttttttttttcgtttttggtattattttatgaaaagggtttagattaagatttttgattgagttattttaaagtaagttgtaagatttatgatattagattattaaatattttattatatattttttaagaataagaattaatattattatattaaagaaaataaataattttataatattatttaaagtttttttatgtttaaatatttttattttttttagtatatttttgtatttattttttatagtttgtttttttaaaatgtttattcgttgtttttggttatatttttttaattatttataatttataataattaatttatttttttttttttagaatggtattatttgttttagagatgaggttaaatatttgtggaattttttttatattgaatttattatattattttttttgatgtttttaattttttttttttaattgttatgttttttaaggatttatgtagttttgggttaaatatttggtagtaatgtttataggaggagttgtgatcgtatatttattatattaggaggtatataaagtttagggttattaggattttttttgattttatatagttaaatttattttgattttttcgagatgtagaattatgggttgggtgtttagtgggtatgagtgtgatattttggtaataggaggttttgttattttttttattttttacgagttttagttttttatattttgaggttttgagttttagatttttaattattaggttaggtttttttagatttagattttttttttgttttttttagttttattttgtttgtatttattttcggattattttttttttataggtttagtttttgagtgtttttattttttaaataagtatttttatttaggagtaatttttttattagaggatattagttatgtttggaaaaatgttttgttgttatgattggagtgaggaggaggtgttattagtattttgtggggaatgattagggatgttgaatattttgtagtgtataagttagtttaattatttatataatagataattatttagttttaatattaagattgttaagggtaaggaggtttgttaggatttttttttttttgagtataagtttttttgaattgagggatattttgaaggaaaagtgtggttttattttagttattttttttttttttggagttttatttgtatgtttgtagtgtttaggtttgtaatttggggtttaggaatttatttttttatgagattgtatgtagaagtgatgatatgtgtatatatgattttattatagggtattggatattgatatttattaggttagttggggtttaagatattatttttttgttaataggtcgtaattttttgtattagagagagggtaaagattgagggaggttttaattttaaattttttattattgttagtgaagtgttaaaaagaagtgtaaggttatttgtttttgtaggaattatataggaaggtagagtgtttattaatgttaaattttattaaagaaataatattttgataaaaaatgtaagttatttttttaagttttagatagtagtttaaaataaaaagtattaaattttttaaattttagattaggtgaaattattgaagttgtagtaaggttttgtgggatttgtagttagagagaagggataatttaatttgggattgtagtagaaatttttatattatggggtttttggaagggattttttttttttagcgacgtattacgaggttatttttaggtaaaaaggtagaatttttttggatttttgaggtttattttatatttattgtttattttttgattttatagaagttaattttagtttgaatattttgtaattaattttttttggttttaagtggagaatttgaatttgtttttgaagaaaattaggggttttttatgtgagtaagtaattttttttgtggtttttttatgtaataaatataagttattgtgagttagtaaaatttaaagtaaggaaagtagtaaattttttattttagtatgttttagtttgtttagtgatgttttagttttgttttatttttaatattttaaaatttataattttatttgattttgatttaataagaatttatatgtatttattttttttgggtttgttattaaaagttttttttaattatttgtggagtaaagataagtaaataaatgtatggtgtttttatttattagtgtttattgtattttataagtgtattagttttattttagttgatagtattaggaaattttaatatttatatataaaataatgatgttggataaaatttatagtattattttatattatatttaaaaattaatttaattaatttagaatggtttaaggaatttaatttaggagtttaatttataaattttttagaagaaaatattgaagaaaattttaggaatattggatgtggtaatggttttttggttggtgagtaaaagtataattaataaaagaaaaataataaattagattattaaaatttaaaaattttttttatatattaagggatattattaatagagttaaaagaaaatgtatagaatgggaggaaatatttgttagttatatatttgataaagaattaatatttagaatatataaagaattatgatttaataatagaaaaataaataattttatttaaaaatgagtgaataatatgaatagataattttttaaagaagatatataaatgggtaataggtatatgaaaatatgttgaattttattagtttaagtgttggcgaagatgtggagaagttataatatttgtatattgttggtgagagtgtatagtggtatagcgattatgaaaaatagtatgatgtttttttaagaaagtaaaaatataatttttataggagttaataattttatttttgggtatatatttaaaagaattgaaagtaggaatttatatagataattgtatatttatgttcgtagtagtattatttttaatggttaaaaggtggaagtaatcgagtgtttatcggaggatgattagataaacgatttatggtgtatatagtatggaatattatttagttttaaaagtgaatgaaatttaggttggatgaattttgagaatattataagtgaaatgagttagaaataaaaagataaatataatattttatttatgtgatgtagttaaaataggtaaatttatagaaatagagagtaaaatagaatttattagaaattgagggtagggagaatgggtagttttggtttaatgggtttagtttttgttgggatgatgaaaatgttttggaaatgtatattggtggtggttatataatattgtaaatgtgttttaggttatcgaattgtatattgaaaaagtggttagaaggtaaattatatggtatgtatgttttattataatattaataagtatattaatattaaatttaattattttttattttttttttgttattattcgagagttatttttttaagaattgtaaattagaagggttttttagttgggttgtttgttgttttttatgtttattgtttattatttatataaaggtagagtgagttttttaaacgaaaattaggatatattttatgaatattttagttttttttttttttaggtataatgaaattttagttttttatcgttttttataagttttttattataggatttttgtggttttatttcgttatttttagtttagtttatttatttttatttatattagttttttgttattgttttattttgtttttgttatttgtttttgttgtgatttttatatgtatttgtttttcgggggtttatatggtttattttttatattattcgagtttttgtttaaatgttttatggttaagtttttagaaacgttatgtttagttattttttttgaaatttattttttgttattttcgttatttttattaattttttagtttaggtgtattttttattagtggtaattattattgatattgtgatagattttatttgtttattgtttgttggtgtattagggttattaagatagaaagatttaatagagtagatggatagatagatagatagatagatagatagatagatagataagaggggatttattagtggaaatggtttatatagttatggaggttgataagatttatgagaggttatttgtaagttggagaattaaggaagatagtagtttggtttagtttaaggttaaaggtttgaggggttagaggaggaggtgggaggataaagggttgattggtgtaatatttaagagtttaaagattatataatttggagttttgatgtttaagggtaggaaaagtgttttagattgagagagagagagagagaaaatttgatttttttttgtttttttgttttatttgggtttttaggtgattggattgtggttgtttatagcgagagaggatttttttcgtttagttatttatatgttaattttttttagaaatattttcgtaggtatatttagaaataatgttatattagttatttaggtattttttaatttagttaatatgatatttaaaattaattattatagttagtattattgaaatgtatgttttttgataaagggatttggtttgtttttttattattgttttttattattataattagtaaatagtttttagtaagtatttgttaaatgaataaatatgttagtataattatagtatgatagtataataaggttttaaaatgtttaaagtagtttttggtttaatatttattatttgagtagtttatgaatttatttatttttggagataaatttttattttgtagttcggtttggagggtagtggtatgattatagtttattttagttttaattttttaggttcgaataatttttttattttaaatattggggtatttaggattataggtttatgttattatgtttagttaatttttttttgtattttttgtagagataggattttgttatgttgtttaggttggttttgaatttttgggtttagataatttattttttttggttttttaatgtgttgagattataggtttgaggtatcgtatttggtttgagtagtttatgaatttttaaaattttaattataggagaatttttatgtataaatatgtttgttaaaatattatttataaaaagataagatgaaagtagatggatttaaaagaatttagttatattatttttttatatgagatgggatgtagtttgtaaaagtgtgttaattttttaaatttaaaaatttttttagatggagttttattttgttatttaggttggagtatagtggtagtgatttcggtttattgtaatatttgttttttgggtttaagtaatttttttggtttagtattttgagtagttgggattataggtatatgtttagatttttggttaattttttgtattttttagtatagatggggttttattatgttggttagtttggtttcgaatttttgattttaagtgatttatttatttcggttttttaaagtgttgggattataggcgtgagttattatgtcggttaaaaaagtatgtaaattttatatagagtttataatatggaaaattatttgtataataatatatttaaaaagtaatatttaagataatttatgatatatgaatgtaattttgtataataaagatatttataaaaatatatatatagagaataataaaatgggttaggcgttttggtttatttttgtaattttagtattttgagaagttgaggtaggtggattatttgaggtcgggagttcgagattagattggttaatatggtaaaattttgtttttattaaaaatataaaaaatttgttgggtttggtggcgtatgcgtgtaattttagttatttaggaggttgaggtatggaaattatttgaattcgagaggcggaggttgtagtgagttgaggtcgtattattgtattttagttttagtgataaagtgaaattgtgttttagaaataaaaacgaaaataaaaataaattattattaataaaatggaaattagtattacgtaaaggatagttttagggattaatagttatattgagtttaggaaggtttaataatataatagtagtgatatttttgaggggagatttaggtggtattttttttgtgtattttattttttttaatttaagtaggtattgatttgtgtattttaaagttttttgtgattaaatagatttttatatttttaatatttaaaataaagtatttgaagtaaaataataatgaaaagtggttgagtgtatatttgtagttttagttatttaggaggttgagatgggagaattatttgagtttaggattttgaggttgtcgtgtgttattattatatttgtgaatagttatttttttttagtttggataatatagtaagattttatttaaaataatagtaatataaagaagtttagatttttttttaattttagtttaaagtaaattttttatttgaaatttatagggtagaaatgtcgattatggtatttttagagagtagaaaaatattttttttttattttatgatttattttttggttatagcgtttagttgagtaatgaagttaatgttaagaatattattaatttataaaatattgattattttatttatagatataaaaatattataattatatatatatttatgtaaaattattattatatttaagatagcgagatggattttttttttttatagatgaaaatatgagtttttgagaatataaaatttttatttgagtttattgaaaatgttggttttgagaattaggagatatttagttttttgtaggttttttgggtatgagttatattagtggaggttatataatagtaggaagagtaattgagaattttggaaggtttatatttgtagagggtgtatatttagtgaaatgtagttgatggatgggttaaggtaataatttagtttttttttttagttgggggaggtagatgggtgagttagttacgtatgaggtgtatggtgtttttagagttattgttagtttttttgttgtgaattttatttcgggtataaaaaaattatatatttattggtaagtaggattttttttaggaaagtaaatgatttttttaatataaggttaaatatttttttttaaatgaattattttagttggataatttttttatttttattgaaattgttttagagttgtatttgagtatttggatttaagatagaaagttattttgggggttgggtttggttgatttgggagtgttgtgaagaaaggttttttatttatagaagaataagggtgagttttgagtaggagatgatattttgagggggaaagatagatgggtagatgtttaagtaaatttaggagtttattatataaaagattttggaatttattttttagttttttttttattgtgatataatatatatgaatataaaatttattattgtatttattgtataataggtgtataatgtagtgataattagtaggttcgtaatgttatgtagttattattattttttagttttagagtattttattattttaggggaaattttgtattattaagtagttattttttatttttttttgttattagattttgttattataagtttgttttttttttttatagattggttttttttgaagattttataaaaatgggtttatgaaatatgtatttttttgtagttgattttttttatttattatgtttttgagatttagtaatgttgtagtatgtattagtattttattttttttatggttaaattatattttattgtagaaatatattatatgttgtttatttatttattagttaatgggtatttttttttaaattaaataggaaaaataaaggaagaattaaatattaaaaatatatatgttattattagtttttataggattattatatatagtattatatatatatgtatatatatatatatatatatatatatataaatattaaaaatatatatattattattagtttttatagtatgattattatatatagtattatatatataattttatagtagtattatatatagttatatatatgtagtattatgtatagttatatatatgtatatatatgtatatatatgtatatatatgtgtgtatatatatatatttatatatatataaaatttattatttttgaaggagagtttttttagatatataatttttgtatgatagtttttttttttttgatttttaaatttgttaatattttaatgttttttgaattttatggtttttgaagaaaattgggttgtaattttattgaggatttattgaatttgaaaagttttttttttgttatttattttaatatgttttgtttgttattggtttttgataggttgattataatgtttttttggtgtggatttttttaaatttaattttttttgttgtttaaaatttgttaagtttgttggatgaataatgttttttattaaatttggaaggtttggagttattttttaaatagttatttttttttttttttttttttttttttttgaggatttttaaagtgtatgtgtttgatgttgttttatagatttttaaagttttgtttatttttttttataattttttttttttttgttattgaattagagaattttaattgttttatttttaagtttgttgattttttattttgtatggtgaaatttgttttggagtttttttagtgaattttttattttagttattgtattttttagttttaaattttttatttggtttttttgtaaaatttttatttttttattgatgttttttatttggggaaatttgtaattattattttttgaagttttgtttatgttaagaggtttgtgtatattttttttttttattttttagttttttaattttattttgtttaagtttttgattgattaagtaatttatgagttattgtttatgatttatttatttatgtattattggggtattattttatattttttattttgtatgggtttttttgggttttgatttttagtttttggtttaatagttatttttaaagttgtttttgtgttagtttttaagtttattgtttttgttgtagattttttttttaatgtttgagttatagtatttattttatagatttttaataattggattaattttttttaatgtagtatttttaaggatttttagtaatggagattttatattagtttagagagaattgttttaaaatattagaaatgtatatttgaatgaaggataatatgtatggagaaaggtggataaattataagtaggtcgtggatttttataaagtgaatatttaggtaaatagtagttatattaaggaatagtattgttagtttttaggaaatattattgggttttatttggttataaattattttttttaattttagagtagatatttttttgatttttaatatgatagattagttttgttagttttggatatagttattgttatgttttaggttttgttgtgtgtggttattatttattttcgtggtagttaggtgtttagttttataaatagtttatattttttgtttttttattgttgatagatatttgtgttgtatttagagtttagaaatcgtgttgttataaataatatttttatatattttgggatataaatgtatgtatttttattggtatataataaaaagtggaattgttgggttataggtgattagaaatttggtttagttttttaaaaaataagtttttattgaatagataattggtggaagagggtaaattttttattttagaaattatgtagttagtatatgaaaagaaatgaaagattgagatttttgtaatttgtaatgaattaatagatttagttattgaatagtaatggtaattaatattataaaaaagaaataattagtattgaatttttttttttgatgaaaaatatgatatagtattattaatttttatggtaaaaaaaaaaaaaaaaaaaaaaattttgaatatacgtaaatttttataataaattattaatttatagaaaatataggttatagagatatattaaattatattttggggtgtaatttgtaaaatgtaaaggataggaaattattagataatataaattttaagtaggaatttatggaataaatgaggataaaaatatatttttaaaggtaaaattaaattataattttagatgataaaaatataaaattgtataaagaagtgatggttatgtaagttaggatgtgtttttatttgaagaagagaagagtttattattgagttggggtagttgatggggtttttaggttagttgttaaatttttttttttttttgatggttaaagggtgtttatttttgattaaagggtattatttttagattttttattttttatggtattcgtggggttttttatgataaaaatattaataaagaataaaatagtatgtgatatatggtttttgttttgtattaagttttttttttatttttcgttttagatattgagtatttagaattattggtaattttaggatatttggtagggttattttatatttgggtgtgtgtttagtttatattgttagaggtaatgtttagggtttattttttgaggtttagataaatttgataggatatagttgagggaaaagtttggttttattttggaggttttggttatcggtgtagaggggataggtttttatttttttataggtgtagttatagttagagttttttttttgtatgggagtgaggtttggttttttttttaaatacggggatagggatttttttagaagtggagatgatattattttttttttaatatggtttaatttcgtgtttgttttgttttataggaaagttgatttatattggtgtttagtgaagaaatttaggcgtataagagggatagttggattttaggtttgtgtttgatttggaaaaggaagagtagagattattaggaggtattattgtattgtttatgagtttaggaggtggatgtcggggttgagtttagggtggagagatgttattgtttattttttaggttttaggtgaaaatttatttgtttagtttatttggttttttttggttttttaattttagggaggattgttttttttttattttttcggacgatgttttttgatataggaaagaggatgtgttgttagggttattatgttttggtttattgtgttgttagtagaatgaaattaaaatatatattttataaataataaaataatttataataagtaaatatttataatttatttatattattgaggttttttttaggtgtgagtatagttgtagatatattttgtcgttttagttaggatataggatagagtaaaatgggaagaaattatagttattgtagaaagggtttttatggaagaggtttggtagggaggttagttgttttagggttattatatttagagatgattttttttttttaggtaggattgggattttaaaattttttttgtatttatagttgttttgaaattgtaggatgatgagatttagtattggtgagttatattgttttttttttttttattaaattttgtgttaaatagtatttttatatatttattttttttttttggagagaataaaaataatggaaaaattgaattatataaatatattttaaatatgtgttgttagaagtagttattaaaggattaattttattaaagtgagggaaggtttgaaaagaaaaatattgtatttttatatttaaagtagtattatttacgatagttaagataatatatattaatatatgaatgaagaaaatgtggtatatatcgataacggaatattatttagttttaaaaaggaaatttggttataggttgtaatagggatgaatttgaaggatattgttaagtaaaataagttaattataaagaaaatttaatattgtatatttttatttatatgaggtgtttaaattgaaagtagattaatggttgttaggggttcggtgagggggatggatgaatgtttgtttaatgggtatagagttttagtgttgtaagatgaaaagttttagagatttgttgtataattatgtatttatagttaatattgtattattgtatattttaaaatagttaagatattaaattttatataatgtagtttttggtttaaggaaaagattaattagttttgttattaatttagggaaaaagtatattaatttattaaaaatatattagtatgcgtttattttagatatagaaaattatgagataaaaagagagatttttgttattttagttattatttatgaattaggaaaattagtattttttgaaattagatagaaaggtttataggtttagttttgatatgttgaattagtttgtattttggttggaatttaggtggttttattgtatgtaaagtatttttttagatagtgatggagggagattttaggatagtgattttgttttacggggagaagtttttagtttagatgggagtagttagaagggtttaggagggatatttttaagaagataaaattaatagaatgtttaaagtgtttaacgttttgaaagaattatataaataaaagagatatcgaatttaaattaatgagagttaataaaataaataaaaataaatgtaagtattaattttaagaagaattaatgttgtataggtagtgaaaagtagtttagttgatatatgagaggattagttatggtaaaagaaataagagatggttgaattaaatataattattatataaatatattgggaagagtgaaagagaataagtatttttaattgttgtatttattattgcgttgtgtaataatgggtgtatttgaaaaaaattaagtaataataataaagaaatggtagagatatagaagtaaagttaaaagaattagttaaaaaatttgaaagtggttggtttttagaaaggtagaaattgagaagaggtagagaggatttttattttttttaagagattttgtataaatatttgatttttttaattgtgtataattataaatttgattaaaataaaaataaaagttttagtgaatatgtaagtttatgtttaatgataatcgtatttaataatgatatttaagggttaattaaaatgtgaaaatatttaaatatgaaataggtatgtataaatgtgtttttgatattaaacgtgaatataaatgtgaaataatatatttgtaaatatatttttggatagatagtttacgattgaattttttattttattttttttattggttgatttgtgaatataggtaggtagtggattaggatttaattaggtttttttatttttttgtttttaggtaggttttgtatttatttttgttgtatagagggtttttatttttgttttggttcgttttataggtgattttttaattttttttgttattattgttttatttgagtggagttgaggttattttgattaagaagagtattatttatttgtgttttaaggttagaaagttaaaaggaattttataatagggttaggaattattttatttttttatttattaattagtttgaattgataatgggagatgttgatatttgttttatttatttttatttttagtttatttattttttattaatttagtttaatttttttagtggttatttaattttagaagtagattgatttttattttttttaattaggaaagtttaaagtattttttgtttttttttttatattagattttagttttgtatttgtaagatgtagaggttttttgtaaggtaggtgtttttttatagggttagtttttaaatattggttgtagatgttttttttatttttttttagttttttttgtgttgttgtgaatttgtttattatcgagaattggtggggagatgtgggggaggtggggagatttttttgtgttgtgttaaggtattaagatagattttttttttttttttgaattttatattttatttttttttagatatttgaaataaaatatagattagaaatgtttatttaaagggtaaatttttatagtataaaattatgaagatatagtagatatgaggtaatgtatgagagtgtgatagggtgaggggattttaaggtgttaggaaagttggttttgggttttttagaaggagtcgtaattaggatatttatttataaattttatttataataataatataatgatcgtatatgtaatatattaaaatataattaaatgataataaaaataatgtggtatagttgtaaattttttatatatattaacgttttttatttatttaattataagaaataaatgttgttagtttttttattttatagatgaggaaattgaggtattaagtgggaaagtgttggtgagatttgggtagggagttgaattttggttatttggttgtagagtgtagttgtttttagtggagttagtagatttaggagttgatattagagattgaaattttagttgtgtattgttttggtggttttttgttttaatcgggcgttgattcgggttttgtaggtttacgtgttttggagaaaatagagaaattaataaatgtttttttgggtgtagagtgttgttttttattttttgaggatttttttttttttagttattttaaaattagatttattttttttttgagggaagatgatgtttttatattttttttttttttatggtattttttttagtttttgttagtttttttttatgattttatgaagattagtatttgttttgtgtttattatgtattttgtagggattgaaagggtcgtaggattaaatgataagattttagaagaaatttagtgtttttttttttttttaagtttggttagtttggatatagtgggaggtttttttagagagaggttttggttttacgtatttttaggtttgggttgggttatatataaggtttttttttttttttttttttaggttttttttttttgtagaagtatttgtatattagggtaggttttgtttattgtgggtttcgttttttatttatagtttagtgtttttttttttttagttttgagtaggtagtttttatttggagagtttattaggaagtttagtaggtttgttaggtttaggatggaaatacgtggttgttatggggtttgtatttgatttgattttggagatttttttgtttaagaaggttttgttttttttgatatttaggtttatgatttgtatttgggatgttttgtttttgtttggtttatttatttttggaaatttagttttattttagggttgttgtttggtgaggttgtaaggtttttttgtttggtttttagtagggattttatttaggttattgtttttatatttatagaggattttttttttttttttatggaataagggattttttgagattttttagtttgaggttgttttcgtttattttgtatttggggattgttatagttatagttattattttttatatggatttttttagagagagagttttaaatttgaatttttgttttatttaatatgttttatagtatcggtattggaggaaattttattaagaatatttagttgaaattatgaatatttttattggatattaatattgaaagtaggaattttgagaaattagtatgtgatttttataatttttttttggttaatgttttagtgatttataaggaaatttttattgtttatagggaattagaattgataatttttttataggagatgttgtaggtgagagtaggagtaattagatttgtattgtttttgttgtgggtgttttaaaaaatatggttttggggattgtgtttttgggggttagataaggtaatatttggatatatgatgaaaatagggattatagttgttttgataaggagttggtttttgttttttaaatggtttagggatgtttgtttatatatttttttataatatttgtatagaaatttagggaggtagggttatgtggtgggaatttttagtgatgtagaggatatgatatttttaagatagtttttggaggaggtttatggggagttgtaaagtggatagagatggtcgtgtgtatttaggattttttttgttataaggggattttaaaggggttgtataggtaggttttttagtttgggtttcgtgggttttttttttggtgtttttttgatggttggagaaataggagagagggatgtagagaggaagagattaggggtatcgttttttttcggatttttttttagtttttagtttttttttagattatagtcgtttttattatttatttttattgaagttatgattatttaggtttttagtaattagtacgtgatttttaatttattttatttggacgtatcgtggtgagtttaagaaataagagagattaggatggggatagagtaggtgttacggttttttttgttgtttattttttatttgtagtaggaggaggttattattggatatttgagggtcgtggtttagttttggtttgggtaggatttaggggtgtagatggagatgtggtttttattttttttttaaatattttaatgtttattttttgttttaggattttgttatttatatgtttatttgtgtaggagttatgaggggattttgttgtttagagaggagtttttttatttttagttattgtttcgtttttttatttggattttgtagttgatgttgttttttttttgtattaaaggatatagagaatattattattattattaatattaataataatgatagtagtaatagtagtatatagaatggttgttattgattttgaagtattagggttttttttaaaaaaagggttttgtgatatattgagtacgtaaagttatagtcgtttttgttatttttattttggtttgatttttttaggtcgaaatttttgagagttgttttaggtttattagagggtatagggtgagtgttgtgattttttttgtgttttatgtagtaggtgaatttttgttttttttttcggggaattttggtggttatgtaggtttggtaggttttatttttattgggtaggatatttttagattgttgggtattttggtttaaagatgttttattttgatgttaggttagagagatattttagggatagaagatggaggttagtatattatggtgatattgttttttaaggttttattgtgtattttatttattgtgggggttattggagataaaagggtagagttagtgaggtatgtggttaagttttttttttttttaagggagatgtagggaataggattggttttttttattgttttgattttcgttgaaatttatattgattttagattttttgtaaatcggtttttatttggggtttaatttttttaggtttgttggaagatgggttttaggattgtggttttatattttgggatttcggttttgatgttgaggagagggttgttaggggtgggtttttgggtcgtggggttaggaggtagttttttaggatgggtaggttgggaggtagatgaggtagttttggttttgaggttttttttttttgtttaatgtttattttaggtttaggtttttataggaggatttattatttttatagtatttgtttttttgatatttttagaattttagatattattatagtttttgtatgtagtttgtttgtatagggtaatagtgtgttttggtttgtatggtattttttttttagaaatttgtgatatttatagttaaagtttgagttttggaggatcggggtattgtttattattgagtttttaggttgggagagaggaagagttttttatatgtgtagaaatgtttaaagtttttggtgttgttggttttttgattttataaattttaattttttggagggaatgtaaggttgtttgtttttatttagtagtgatttttttattttagtttaagtgaggaattcggattaggaaggatttttttttggtttttttttatttttttttgtgtgggttgagtttcgttgagtattattttttatttttatttatagttaaatttagtgggaagagataggttttgttttttgtttttaatttttttggaaaaggttttttttattatttttgtttattgtttatttttattttttttttggtttttgatatgatttagggtttttttgagtttttgtttattttttgttaagtttttagtttttgtgttttaggttttagtttttaggattgtttttgtttattgttttcggggttttgttttgtttttttgtttgttatagagtaggaagagttgattatttagatgttttttagcgagaaattttgattgtatagatttatttcgggatagtatcgtgaggttgtaataaagattgtggggttttggggaagaggaaattatagatgaaatttttttttggaagtaattttatattaatgtttaatatataggtttgtcgtttcgatttttttgaggaggtaggaaatgtatacgggtaaagggataagaatgaggattttagacgtaaggaaaattgggaaggtgggaggatagaggaggggattgaggaatagaagaagggggaatggggatggtaaatttgtaggttaggtgttagggtagggtagttataggtttttttagggtatagggaggaggttaatggaaggggttgttttgtaggtttaagggaggagtatgaaggtagtggtggaaggaaggttttgttagaggggagagtagaaattgtaagggatttaggtttagagggatttatgattattatggttgtggtgtataggtgagggtgagatggaggtaaggtttattgtttttgaggaaggtttaatatggataaggtgggggtaagggagatttggttgtgaggtaggaggggtaggtaggttgtggtgttagagacgttttttacgaggtttatattttagggagaagtaatggtgtgggttttagagtggtatggtaatgttttaagtagggaggtggatggattagttggtgttttttggggtgggttggtggtaagggttttaaagagttagtgtatttttttaataaatggtgttaggaaaattagatgtttatatgttaaaaaaaaaaaaaaaatgaagttggatttttaatttatattatatatgaaaattaattaagaaaaatattaaagatttaaatttaagaattaaaattgaaaaatttttataataaaatatagggaattatttttatgttatagaatttgatagtatttttttggatataatattaaagatataaaaataaagaaaaaattgataaattggatttattaaaataaaaaagtttattaaaaatataataaatatagtgaaaaagtaatttttagaatgaaagaaaatatttgtaaattatatatatttgataagagattaatatttagaatatataaagaatttttataatttaaataggagatatttaattaatataaaagtaggtaaaggatttgtatagttaattttttaaataagatgtataaatggttaatagatatatgaaaagatgtttagtattagtagttattagggaaatgtaaattaaaattataatgaattattattttatattaattagtttggttattattaaatatatatatatatatatatatatatatatatatatatatatagaaatattaagtttggtaaataggttgcgaaattggaatttttgtgtaatgtatttggaaatataaaatagggtatttgttatggaaaatagtgtgttgatttttttaaaaattaaaaaatgaattattagttaggtgtggtggtttacgtttgtaattttagtattttgggaggtttaggtaggtagattacgaggttaggagattgagattatttcggttaatatggtgaaatttagtttttattaaaatataaaatattagttaggtgtggtggtgggtatttgtaattttagttatttaggaggttaaggtaggggaattatttgaattcgggaggcggagtttgtagtgagtcgagatcgcgttattgtattttaattttggcgatagagggaggcgtcgttttaaaaaaaaaaaaaaaaagaagtagttggatatacggtttgtgttgggtttgggtagaggaggatagatgtgtagggtaaggattggaggatggggtgagtatggtgtgggggtgattttgggggaattttggttagggtgaggataggaggggagggtgttttgagtgagggtggggtttgggaaagatgagaatttgttgagggtttaaggtagttgggtaagaggtaggagtagtataaggttttaaggcggagaggggcggagggattagggagggatggtttagtattcgtgggttggagtggggggtttttaagagggtggggttgaggatgaaggagtagggaaggggttatcgtgaggtagggtttagagtaggtatttgtattagaggggagggggtatttgttttgttttgtgttttgtttaaggtttaattaatattagtattagggttttttttgggtggtttagaggggagtgggacggagggaagattttgggataaaaggcggtattagagagttagggttagggagagttaggagtgggaggtataggggtagttttgggttaaggttgtttttaggaaaggtttataagggaggtaggagggatttgcggtggcgggggtaggggatgaggtagaggatattttagaaatgtattagagaattgtagataggaaggggtaatagggagttgggagggtaataggatttaaggtgttttgagggtaggggaggaggtgggagggaatttggtgtttttagattatcggagttaatagtagtagggaaggatgtaagataagagaggattttcggtagcgggaggttaggggagaatgagttggggatgagagaagtcgtaggaagaattttttgttcggagtttgtagattttaattttttagcgtgagggttaggagttttatagtttttatagtagtaggaagtattagtttcgggtttcgagaaaggagggttttaattttaggagatgcggtttaggagttgagaatacgtcggtttcgggagaggatagggttttagggattttagggtcgtttttagtatcgagggaggtggttgttttagcggtcgcgttggaagggttttcgaatgttatttataggagtagtttaggaatttaggggttttagaaagacgggtttgttcgaaaagtgagaggagacggaggagaggagaggagagaaagtgtaggataagattagaaaatgtagggggcgggtgatgagcgatttcgaggaggattgaaaagagacgtggaagtagggttgaggtgtggcgggaacgggtcgcgtttatttttcgtattttcgatagcgtatttgagtttcgtttcggtcgtatagcgttcgtcgttatttattcggatttttagaaacgtttcgtcgttgtcgtttcgtcgaggatcgttaggaattttatttattagtagtagttttttggggtgtaaaaagggtagtgcggattaggaatagtaggattaggtttatttttatggtttagattttgtttttttcgtagtggtttaagcggttgttaatttagcggagtcgcgaaggtttattagaaattttttgttatttggttttattttagtgatcgtttatttaatgaaaattggcgttcgtagtttagggttaattacgagtttggagggcggggttatatttagaagggaacgttttagcggttaggagatttggagaattttggttggcgggatttggagtttagaaaagggggagcgcgcggaagcgtcgttaaatgcggggattggtttcgagtagttgagagtatagttttaatcgtatgagtacgatttgggttttgtcgttttttttgtattgcgattattttattttcgtatttttatttttaggatagcgtgttttattaagatcgtttcgttagttattttattaagttgattgttattcgtttgttttttttaggatatatttatagaagagacgaggtttggttatttttttaatatattttttttagtcgcgtatagcgttattggttatgtggttagtgattagatttgtagatttgtttttagattttagttatttttgtttttgaagtatttgttttagttgattcgttaagacgataaattttttagacgttttagttttataatttttttttttttttttttatttaaagttaggtttttttttttatggttattttttgtaagtgtgtgaggtttttcggggttgtttttttatttagtttttgggtgattaaaaggttaaggaggtagtttgttagtgtttattttaatattaagttttttttagatttttttttttagtttgttttaggatatttgtatttttgagattatagtagtttttaatgtgataggtttataaggatattttatacgtttcgtatgatattatttttttttttttttttgttttttttttcgtggtgttttttgatttttttttttttttttttaagtatttaaagtttttttaattttattttgattttatagttattattttagtttcggtttttagtttagattattgtataggatttagtttagattattgtataggttttttaaatattgtgattgttttagttatagttagagtgttttaagatttttatagtattttatgtgttgaatgttatacgtgaggtttttattatggaagttatagttgttataattttttgtttgttattatttttatttttttggtgatatttttttttttagtgttgtagtaaaagtgggttttttaatttttttgttttgttttatcgggatgttattgtttaagtagttttttgtttttagattattgttatttttgtttttgagtttattagatcgtgttatatttttaaatttttttaattaggttggttagagtgtagtggtgtttataattaattgattataattaattatagatttttttttttttttttcgtttttattgttttatttgattagtttttaaaaaaagaaaatttttttaattagataatagcgattgtggtacgatgttgtgattatgttaaaagttattgattagtatatttttttttttaattaggaatatttgtattttattgaatgttattgtagaaaagtgtgtgaggataaagggttgatatagaatttagttttggggttaggacgaggaatggaagttggagtatgtggaatataggttatgggtagagtttttggtttggatgatgttttttgatttatcgatagattgggaagattaatattaggatgatgatggtgagtagaatggttatgatgatgtatataattagggtttagatgtttaggtatttggtagtggaggtataggtttgggttttagttaggtttttaattatttttttgtttttagattttagggagtaggtgaatgttatgaattttaggtagtgggggtttatgaagaggatgttggatagggattagataatatagttagatataggaggtttcgttgtagatatggattatggtggatattgagggagtagggttgtggggcgtttttagtatagttattttatgtttttttttgagtattttatagttggggttggggggcgggggagggtagttattgttggtaggaatgaagaaggtttgggtagtgtggtttatggtgtttagtaaagattagttgtggttaggttgttgggatggttttgagtgggttttggattgtatatttttaaatggtaaattacgtggtatataaattatatttcgataataaaatattatgtaaaagtttttttttattgaaagaattatttcgtttttaatatatacgttttttattttttggaatatttagttagtggtttttaaatttagttattttatagaattatttggagagtttttaatatttacggttttaggttatagttaaaattaattgaattagtaaggttaggttggatttaagttttaatattttttaaagttttttacgtgtttttaatgtgtaggtaagttttagaattattgttttagtttatggtttgaatttttttgatgggtattaattttgtttgtatttttgaattttatttattatttatttatttatttatttttaagagggggagattttattttgtcgttagttggagggtattagtgtgattatagtttattgtagttttagatgtttgggtttaagtaatttagttattttagttttttgagtatttgggattgtaggtgagtgttattatgtttagttgttatttattattttgtattattttttattatacgatgaatagtttatgatttggaattgtgtttattttatttttgttatttttataaatattttttaaaattgaattatatttataattattaattattttttttaaaatttttagtttatatatttttgtgagtgaaaatttaagtattatagggttttaataattatttagattttttatttatatttattgattatttattttgattattataatttattgcgtatagtagggattggggttttgtttttattttagggggattatttatatttttaaagattataagagtagtgaggggtagagaggtggttttagtttttttgatagaggttttttttttttttatagtgtttattttttttttaggacgatttttttttttgtgttagttttagtaaagggttttatttagtttattttaaaaaatatttttaatatttaaataacgataataataataatatataaggttagttttaaggtatgtagaggtgatggttagtagaggtgaagttaatttattttttttgggttaggggaagtttagatggtttttcgttcggggtgaggtattttttagggtttaggtttggttgttcgttttttattaagttttttaggttttttgtttaatgttttttttttttattttatttttagttttttttgttttgttttattaattacgtttttttttttaggattcgttttagatttttgaatttcggggtatagaggcgatttttttttcgtagattttaggcgttattgttgggttcggaaaagaaagagaaaggatttagtgcggtcgtttatagaatttagggcggggttgggttgggcgttcgcgcgcgtttttaagtttgcggttcggagtttattgcgaggattgagattattcgttatttcgttttggtttataagtgtttgttgatatagaaacggaataacggcgttgtgggttggggaggacggagttgtttttaggtttttggtttttagtcgcggggtatttatagttgtcgttgtgaaaatgtagatttgtggggtaggaatttcgagttcggggtggagcgcgatgtggaatttgattcgtttgaaatagtatcgcggtggattcggattcgggtgagtagggaaatgcgttttagttttttttacgggtcgtttacggattttaggattcgaaaacgtttttagttgtttcgttattttaggaaggtagcgtttgtttttgggcggttttgacggaaattggttttttcgtttgtaggaaaatttataattaaggggttaggagaaagttttttagggtttcgtttttttagtgaggattttaaatttatatttcgagtgtggttttattaaagattggagcgacgtttattgaaatgatataagattagtaggggcgtagggtattgcggtttttagaatgcggtgatagcgtcgtttcgcgtttttttttcgatttgttttaggcggacgcggtgacgtgtgttggtttcgaggttggaatatatcggggattaagtgtagagaagggagaaagtagggaaggatggttggggggtgggggtggggggagcgtgttgaagaaaaaagggaagagagaggaaggaaagaggagaaaaaaggtgaagaagagaataatatttaaaatatagagttttattatttttaatttttatttttggtttttatttagttttggtatgtatgaatatttttaatatagttttatttttgtttttttttttgaatttgtaaatatatagtaatatatatatatacgtaagtttttatttgtcgatgtgttagggtgtgttttttgggtatagaaataaggtttttgttttgttttgttttatataagtaaagtataaattttaaagaagatatattttaaaagttattttattgggatttgttttgtatataattaaatgtatttaaaatgtatttatttgaaatgtatagttcgttgtgttttggttgttgtatatatttatatttttattattataatgaagatgtagaatatttttatcgttttttaaagaattgttatgtaatataattttatagggttataaaagaggtaagattagttttaagtattgttatgagaagatgtgtgcgttttatatttttaattatttattaaaagatgaggatatattgaattataatgttagtaatattatttttataatgtatattttaagtagggaaaaatttggaagattttttattaaagtttttttttttttttttttttgagatagagtttagttttgtcgtttaggttggagtgtagtggcgcgatttcggtttattgtaagtttcgttttttgggtttacgttatttttttgggtttacgttatttttttgttttagtttttcgagtagttgggattatagacgttcgttattatattaattttttgtatttttttgtatttttttttttggtagagacggggttttatcgtgttggttaggatagtttcgattttttgatttcgtgatttgttcgtttcggttttttaaagtgttgggattatagtcgtgagttatcgcgtttggttttttttttttttttttttttttttttttgagacggagtttcgtttttgtcgtttaggttggagtgtagtggtgcgattttggtttattgtaatttttatttttagggtttaagtgatttttttgttttagtttttttagtagttggaattatagttattcgttattatatttatttaattttttgtgtttttagtagagatggggtttcgttatgttggataggttggtttcgaatttttgattttaggtgatttattcgttttagttttttagagtgttgggattataggcgtgagttattgagtttttattaaagttttgatagtgattttagggattataataatttggtgatttttattttttttgaaatgttggaattttatattatagtattaatttggatttggtttggttcggtggtttgtatttgtaattttagttttggaaggtgaggtagaattgtttgagattaggagttcgaggttgtattgagttatgattgtgttattgtattttagtttgggtgacgaatggagatattgttttaaaaaaagaaaaataaatgtaattaaaaataaaaataaatttgaatttgtatggaggttaaggaagagtatattttagtttgaaatattatgaagttaagttttaaatttaaatagttagagatttttaaatattaaagtgttaattaaaatttaatattagaaatttttttttaagagtattttttatatttttatggtattgatttttttttagtgtttttgatagaaatgtttttagtggagtagagatatatgtaataaaatttatagaagggttataataaagagggaaacgtaaaatcgagtttgatataggagattttgttttatttatatttaaagtaattttgaaaattgcgtcgttatggtgtttttgggttgagataaagtcgaagtaaattttgtttttagagtattgattttttttttttaatggttaaaggttttcggaattagtttgaaaatttaggttttgattttggatttaaagaagtgttaagaatgtgcgggtagtggcgttgtatgaatttagcgggtttgggcgatgtttttttcggttttatttagtagtaattgcggtaaggataggacgtagcgaaattgtattagtgagttagaggttaaaggaggaattttggtttaatagcgtagagtgtgttttgttaaggtggggattaggtagcggagggaaggtaaggatattcggaataaatggtagaggaagaaggcgcgcgagggaagatttaaagtttttcgatttttttttttttttttttttgttggggttgaagggtattagtcggtggggtgtagagaatgggaataattagagagggcgtgttttatataggcgtttcggttttttttttttagttattattgatgagtttaaattaggaggatattaagacgtgttttttgtaaggtagattttttatttcgtattttgtttggttttttaaatttattttaatgaaatataaaaattaagagttaaattttgcgtgtgatttttttgattattataaggttttttttttttttattttttgcgtgttttttttttgtttcgtttttttttttttgtttttattttttcgtttttaagtattttttgttttttttagaggattttttatgaagtatagatttttttatttttaggaaaaagagataaagtttattgagaaggatttgagggatgtttgtgatttcgtttttgaggttagtttttttcgtatcgttggttttgattttgtatgtgtgtgtgtgtgtgtgtgtttgtgtgtgtgcgcgcgtttgtgtgtgtgtttgtgtgaatgttaatggagagttaaagtgttaaattcggtatttattataggaaatttttttattttggtattgtatgtaagagttagcgtatttatgtgtatttgtgtttttattttaggagttggaataattttatttatgagattcgtagagtgttaacgtttttattttagaaagtttaagggattttgtattagagaagagggtgagattggaggggtttttgattttaaattttttgattttttttttataaagagatgttgaaaaaaagtgttggataatttatttttttttgggattagagaggaagttagaggtatcgtggatgttaaattttagtaaagaaataattatagtaaaatttttatgttatatttttaagtttatataatggtttaaatagaattagtattaaaaatttcgaatttttggtttaggtgggattattgaagtttgttgttaggtttggtaggatttgtaggtagaaagaatggtatttttatttagagttgtagtttagtagtttttgttttttgggttttttgaaaagattttttttttttagtagtgtatagtgaggttatttttggggaagaaatgtagattttttttgggggaggtttttatatttagttattgattttgtattcgttgattttatttttgaatattttatagttatataatttgttttgattttaagtgtagaataaggaattgtttttgaagtagaaaattaagggttggtgatttgtattgttatttttttttatggtgttttgatgtaataaaattgtgagttaataaatttatggataggtaaatagtaaattattttagtaaatgttttagatgttttttcgtgtttagtaatgttttagttttattttagttttaatattttaaagtttatattttttttggtgttgtttttaaaataatttatgtatatttattattatgggtttgttgttgtaaatttttgggaatgaattgtagaattaagttaagtaaataaatgtgtgattttttattgatttattgttaatattattttaaatatttgattttaaatttaattattttttatttttttattattttattttagagttaattttttttaggatagtaaattagatgggttttttagttgggttgtttgttgttttttatatttgttgtttattatttatgtaataggtagagcgagttttttaaatgggaattattgtatatttttattattatattttacggatattttatttttttttttttttagtgtaatgaaattttagttttttattattttttattagttttttaatatagggtatttgtggttttattttattatttttaatagagtttgttggtttttatttatattagttttttgttattgttttgtttttgtttttggtttagagttattttttgttatggtttttggatttgtgatgtgtaagaagtttttaggtatgggagggattagaatgatggttttgttttattttatatgtagggattttattgtttttgggggatttgttgagttatttttttttgtttttgttggggttggggatggttaatttagttaagttatatattttgagaggaaattaggtagataggttgattgataaggagggtatagtttgttaagtggttaatgattttagttagaagaggtgaagggtgagagaggaggttgttgggaattagaagtttggtagttaggaagattgagaataattaggttgatagtagaggttgtttattttaagttttagggtgcgggggagggttttttatattagggagttttaggtttcgtgattgtttttgggttttgtatttttttgattttttatgaggattttaaatagtgagataaggtatttagggttttaggaatttgaattatttttattaaagagattatttttttattttattttttataagatatgaaatattaaattaaattaatataggattaatgtgaagttagtaggtgttttgtggatggatttttttggttgtttatattgggggaagaaataggtttggttttatttatagatgagaataatagggtagttatatttagaggattttaatattgggtgtttttaattttgtaggaaagattttttttgtaaatagatgtataggagggtgattgtaggattttatgttgtttttttttttttttttgaattttgggtttatttttttaattttagttaagtagttatattaattagttatttaagatttatagggtttttttttattatggtatttaatagggttttttttttttaaaagaattttaggaggggtttatttaataaaaagtagtatggaaggggcggtaggggtagtttatttttaatttttgaaatagataggatggagttatcgttttattttttatttattttatggttttgttttaaatatagttttttgtaggttttgttgggtttttttattattattttttaggtggtgatcgggtttttgatgttgatgtggtgtttatagttttttgaaatatgatttttggggtttaatattaataggagttgaggtcggggagaagttttaagttgtaggggatttttggatttgaaagtaggggttggttacgggttgtttgtaatgtttagggtgttaaggttgagagtggttgagttgaatttgtttattagtatgttttttattgtttgagagttgttttgtgtagattagtaagatatagattgtttatagttttttttgttttttggaagattttgatttttttttttttagttgtgtagttgatgagttttatttttttttaagtatagtaaggggaggatggtgggagtgaggtttatttttttgatgttttagaattttttttacgtaattttaatatttaggtttggtgtatttttttggattattattttttttttgggaatgaaagggttataatattttttttttagattttttttgttatttatttattttgaatagattttttattttattagttattgtttttatattatttttttgaagttgtggtaaaatattattagttattaataaaatatggaggttaggttttttttttggattttgaggatttgttgtgttggggtaggggtaggtggggagagaagggcgggtggagggttaggtgttgagtggtgtgtggtttcgttttgtgtttaataaagtttttgttgtggttattttttgtttatttgtttggatttttttttgtattgtgattggtgtttggtttttaggggtgggtgttgttttaggtcggaggttttatataattttaggttgagtttttttttaagtttatggaggttaagggtagatattggtagttttttattttgttttcgtttttattttatttggtatatttttatatgttgatttgattttttttataagggatgtatatgagtattattttgtaggagagtcgttatgttttatagtggttatgttttgtttttgatattaggattttgtgtgttttgttgttgtcgttttttaaagatttaggatagtttttgtatatggggttttttagatgatatagattgatcgtttttatttttgtttttttttttgttttatttttagaatgtttttattgttttttttttattgtagtaagttaaatttttgaattaaggtttgggtatatttatttacgtttgtaattttagtattttgggaaggttaaggtaaagggattgtttgaggttagtagttaaagattaatttcggtaatataataagatttagttttttttaaaataaattgaattcgtattgtgaatagatatgttattgttatgttataaataaatttttgtttttttttttgtgggagtattttgtggtttgggttttggtaggaaagatatggtatagaaggaagatacgttttaaagaggttttggtagggttaagaaagttataaggggtattgaagttttttgggatgatttgtagtaggaaatggtttgtatttttgagtttgaaagagtaaggaagggagtagtttttagaatttaggtaaatttgtagtttttattaggggtagttcgttatgtttatggttgtagatagaggtttgaagtgattatagaattatagagttgtttagagtaagtgagggaaatgaaaattttgagttatttttttttttatatttttattttttgtaggtgtttgttattatttatatttaagtataagttagatggtgaaggagtataggttatgtcgtttgtttgttatagttgttttttagtgtagggggtaggatggaagagagtggatgatggttttgtgaggagatggaagttgagaataatgtatttgtttatagtgtttatattttttatggaatttatttaaatatattagtattttttttaatttaaaattatatttttaaaaagtaacgtttcggttaggtatgatgatttacgtttgtaattttagtattttgggaggtcgaggcgggtggattatttgaggttaggagttcgagattagtttggttaaagtggtgaaattttgtttttattaaaaatgtaaaaattagttgggtatgatggtgggcgtttgtaattttagttatttgagaggttgaggtaagagaattgttttaatttagtaggtagaggttgtagtgagttaaaattatgttattgtattttagtttgagtgatagagtgagatttcgttttaaaaaaaaaaaaaaaattatgtatatatgtttagtaggtagtaatattgaagagtatttaattttttttttttatttttatatgggacgtataatttataaataaatattttaaattatttgagtataagttataaaagtagagtttggtttatataagtaaaaggaagttgttgggtagttgtgggtgaggtttatagaattatagatgtttttaaagtattaggatagtattaaggagtaggtagtaagttttgattagttttattggatttatttgtggagtgggagaattgttattgttttttgatattttgttattgttgagttttaaattttggaatagtttatttaaatggtttagtttggattttataaattttttatttgtttgtgatttaattttagggatagagttaatatttgaatttgattttatttttaaaaatgaatttaattttgaagttgaatttaaattttattttaaggatagagttaataggaatagagttaatgtttttttttaatgggagttttttttttttatttatttttttaaagtagggggaaggggatgagttttttaagtttttatggatttatggatattatgagattaatttaattgtttttattttatttttttttattttgtagaaaagaaataaatttttttttatttaaaatatgatagcgtttgtggtttagggttggagtttatagtggatgtttagtagttaattttttggaattgagatttttttagtaggtttgggggtgaaaagagaaattagattttaaaagggatattagtgttttgttggggagagaggagtatattattgtattttattttgaagaatgggagtgagaagagaggataggtgaatttattatggttttagtgagatgggagcggggaacgtttaagaaggaggatagttatggggtggttttagttaaagttattagatattattatatgtttggggtttttttaggtcgatatgagttttattgttttatatattgttttgttaagagttagttgttagtagattagtgagagagtaattttgatatagaggaaattatgtttgaaatgggttagtttagaagaatttagtagtaggttttatgtttttttttagggttttatgggcgtgggtaatttttttttttttttagttatttattttaggtaatgaagaaagttttttgaattgtgtttttgttgggtatataggtttttattatatgtatatggtatgggagttatggttaaggtagggtaagatttttatttgaggttaggaaaagttaatgattttatatttggtttagtttttgtggggttttgattagggtgtgggttattgtgtttttatagatgttttgttagtttttaggttgtgagatatataggtaaatgttatattgaagtttttgttttttttatacggaggtaatattattgtagtagagtaaattttattgtattagtgtattaattttaagtttatgtttattatagtaggaaaaattaatatgtggtgaattttgtttttataagggataaggatttgataagattataatgattaggatggttaatatttttgtttttttgtaatttaaattttgtttggttattatttatttgttttaattttttggattttagtttttcgaggatagttagatatttgaaggaagtgttaggtatagatgttaggttgtataagtgttggtttttgagtaattggagaagttgttaggttttagttggtttagagatttttggtttagggagtataattggatgttttgaataaagatatggggttattggaaagagaggatcggttgtttttttttattaagaaataattaattgttagatgagggggaatttttttttaagggttttgtggattgtgttgttttggagggggtggggagagggaggagttttgaggtttgggttggggtgtggttgggaaggagttgagagttgagagttgtaattatataaggagttgtaggggtgaggttggtgtagggtgggatttagaggattttttttagatttttgtgttgattttttttattttttttatttttatttttggtgtttgttaatatgcgggggtgtttttatttttttattgtttttggagttgttttatttttttacgtttgttttggggtttttagagtagtatttttgtgagttttggagtgttagggattaggaggggagaggaggtaatagttttttttaatttggtaatagtttttcgttattatttttattttttaaggtaggaaaagtgaaggtaatagttttgagagattttggaagaggaaaaattatggcgggtgaggtagggagttgtttgagttttttagtagatattaggagttcgtttttttaggtttgggttttgttttagtgtttggttttgtataggtttttgtttttgtttcgttttgttgtttttattttttttttagtttggttttagatagaatttagattaatttttgtttgttgtgaaaaatgtttttgttagtttaggtagattttgttttagagtattggtgtttagttttttataggttttgtgtttgttttttttggtattatgtttttttttatgtatttttttgaattggtaaggtaggaattatattattggtttgtagatgaggaaattgatttatatggttttatttagtatttatttattgtgaaagtgtttgttagggttaattgtgggttagatgtgtttagggttttatagttagttggtggaaaggtttgaagggtttatatttaggtttatttgatttgaaaatttatattgattttatttatgtattaatttttattttataatttatgttataaattttattgttttaagaagttgttatagtagtttttagtagttattttgttattagttagtagttattaatattgaggtaagattttattttagtaaaaatattagtattagttgaagttttagatgattgttagtattttttagtagtagtgtaatttttaattaaggtatgtatatatttattttatatataatgttattgtatatttaataggttaaagtataaatataatttttatgtatattataaaaataaaaaaattgtgtgatttgttttgtttgtatgatttgaaattaaatttgtaatttttttgagatatgtttgtaatttttttttttttttttttgttggtttagaatgattttgttttttgtttttgtttagttttgtttgttataggggtttgttttttttggtaggtttggatattttgtattttttgtaattttgttttttggtatatgatattagtattagttttaagttttgttggattagcgagttttattttatattttttgaattagaattaaagttttgtgtatatattatttatgtgagtttgtagagattttagttttttgtagggtgttttgaaagggtgttttgttgtgattggagggtatagttataggtttttgggtagaggtggtttagaaaagagtgggtggttttagtttgggttatttgggaaggggaagatttttagataaaaatttatgttttagaagataaaattatttaagagttggtagtagttaattagtttgttatttgggatattattttgtagtgggagggaagatagtttttattatggtgtaggggtttagggattaggtagggaggtttttttagtggttagtgttttttatagttgggagatgaattatttttcgatgaggttaaagattttatgttttttattagttgattcgtttttatttagtggaaaaagaatttagaatttttgtaaaattttaggagagaaggatttttttttttgttttttagtgttagggttatgtatgatttatatttgaattgtaatgtgtatatagtttaaagttttaattattagaatataagaggtttaaattattgttgttatagatatgtaaaattatgtagtataaaattaaataatttttaattaattaatagtggagataaattattaatatttgtaaatttaaaataagatcgatagttttttagaaaaataataaaaaatgagatttttgtaagataatttaaatgatacgttaataataaatttttatgaaaatgatatttcgattatttgagtttttgttttaagttataaattttaaaaggtattaatttttaataatttatagtagggagttttaagttataaagaaaggtgttagggtatatttgagatttgaagtaagaatatatttttttttagggttacgagtgaattttttaagatttttttttttttagatattttttttagttattagaaggtttatatagtattaagatttaattattttattgtttttatttttatggagagagtttaggtgatagttatttttgtttttttttttttattttttatagttttagtattatcgttcgtttcgagtttattaggattgagttttttatgttttttttttgtttgtgttagttatattgggttttttatatatttagtatttgtatttttataaggtttcgtacgttttattttttttttttattatgttttttatttaattttagaaattttttttttgtattttttggaatttttagtttatgattagtaaaatttttttatttttttttaggatgtttttttatttcgaagttttagtaggaattaggtttttttgaggatgtgattcgttttgaagtttttttatatgggggagttttttagtaatttgtatttttgggtttagaggtgaggtggggtttttgttttttattgtggtttttagatttttttgtattttttttttttaaaatttttaagttgttattagattaaggtttcgttttttttattgtagttattttttgtgggttttaagttatttttgttaattttaatttttgtagtttttagattattgttattttttttagtagtgttgtttttttgattttttttgattttaatatatgtagatgtgttgggttgagtattagtttttaaagagatttagttttagtttttggagtcggtgaataggttgtattgtatggtaaaagggatattatttatgtaatgaagataaaggattttaaagtagggagataattttggattttttgtgtgggttcgattaaattatatgagttattaaaaggagagaatttgttttggatggagttatatgttgtagagaaggaaggtagaggagatatagtaaaggggagattagtggttttaagtaggaggattggatgtgttttaggtattagagagaagtttttaggatttaagggtgtttttaaaaaggaagtgggaagtttagttttatttgtaggaagtgaatttagataagaatttgaataagtttggatgtggatttttttttagattttttaggaaggagtatagatttgtttatattttgattttagtttcgtgagattgggtggatttgtaatttatataattgtgatatgataattaggtgttgtttaaagttgtttggtttgtggtaatttttatggtagtaatagatatttatatagtagagaagatgtttttattttttggttttttagattttggaattttttttttttattattattttttttttttgtcggaattttaggattttgtttttttttaggttttattatggtaaagaattttagttttttcgtatttttaattttatattttttattttttgattatttttttatttatttttttgtagggtagttataggttttgaagatattgatgttataatttgattatatgttataatgtaatattagtgaattatttattgtatgtgtgtttgttttttaggtatggagtttattttgtagtatatttattttaataatttttttatttttttgaaatttttaatttagtgatgttgttatttatttttttttttttagtgtttgttgtttttttttttttttttatttattttggattttgtagtaaataatttttattttttttttgtttttttttttcgttgttatatttgtttggtaaaattatatagttagtggattttattttagtttatattgtatttgtttttatgagttgtaggaggttggagagtagtatataatatgttgattgttttttttatatttacgatttaaattttatggggagtttttattatagttagtaattattttttttttgtatggtttatttttagtttttttttggtttgggtgatttttatatattttttttttgtttttatatatttaattttttttttttatttttattttcgttgatgattttgttttttattttattgagaaaattgaatatatttagaagataattttatagattttattatcgtttgtttatgtatttgtagttgtattatatgttaggtattttattatatgggggattgttgtgtgttaaatattttgtttttaattagagttagtttttttgttggtattttgaatattatttttttttatttatttaaagtgttagtttattaattaatattattttttttttttattgttattttttttttttttattttagtggattattgtggtatttatgaggatgtatattttaggtttttaggtagaggaagaataattgatgatgttttagttgtcgtagtttgaaatttattgttacgtttgatttgagattatatttgttttagttttttttaattaatgattgattaaagtaggaaaattaaggtaagaatatttttatttcgaaggttggttgaggttttaggattttttgttatttttattgagttttttttagtttatatagggtttaggatgtttttagttgatttttttgtttttttttttttattgggatttagagttgtattgtgatttgatggtttttttagtatttttgtttttattttgatttttttttataattattttttttaataaatttttatatatttaatattgtattggggtttaattttaggatcgtagttattataagtggtattaagggcgatttatgaaaatgattaaaattggaaatttgaaataagtttttttattgtttgttaggttaagaggatgttatttaggttagcgggggataaagaaagtttatggagaagttgtatttgagttgtcgtgggttttattagtgttaatttgagaagatgttttggttaggggaagttatggaagatgtggtgatagaatgttttgtataataatgatggagttgggggtaaatttataaagatagtggagttggttggttattttttagttgtgttgatgttttataaaaggataatgagaatttgtaggttgttaatagttgttattggttatgtgtgagagtttttgtagtgttttatggagaggtttttattttttggattaaaagagtagatagtatggaatggtagttgaatattattatggtgggtatagtgttttagagacgtttgatatttagttaatataggttttttataggaaagttagggttttggtgggggaattttagattttgtaaattagaatagagttatttgatgggtgtttttttttaggattttttgggtatgtagaggaggtttatttttttttagtaatcgtttttattttttatgttgaaagatgttatagaagttttatttttacgatgtagtaggaattttatttaggagttttgtaggaattagttagtatgtttttataggggtttggggtgtatttttgggattggaatttgagggtatttgattaataaattagaattttagtttggatgaataaaaattttttggtttggaggtatttttttaggatatgggtttattaaagaatttaggatatggggtaaatttattattggggtgagtttatatagattggaaaaaatgatgtttaatttttaataaggtagatatgatttagttattttggaatatgtagaggacgtaataataaggttgagggaagtgggtgtgatgaaggtttattaggattatgttttataagaggatttagagggtatattttttattagagttttaggaatatgttgtggagagggatttgtattattaagaagtgtcggggtgttattttttgtaggttgggcgtgatgatagtaaaggttttagagttgtgtttatttatatttttggggagaatgtgggtttgtagagattgagaataagtggtggtagtgatttgtaaaagtcggagggtatggttattatggtaattttagaggagtagttaaggggatttaagttgtagggagtgtggggaaagttagtagagaggatattagggttataagaggtagttaataagggtattgtttgatatatatgataagaaagtaagaattgaggagtaggagattgagggtgttcgattaaatataaagttatgattttttttttaatgtttagattttaattaagatttagatttagattttagtgatagaggaggagtttatatttttagagaaaggattttgggatattatggaggtatatggttgggataatttttttagtttttcggtaagggaatttatagttatttatttaggagattgtatattggggaagggaaataggtagaattagggggattatttttattgtatgtaagttgatattgatgtttagatgtttatagtataattattttttttattatagtggggtttacggaggttagggagtaaatttggatatattatggttcgtaatgggattattggatgtatagatttaattttgattattttttaattttttgagtgtataattgatattgatgttttggtaagtggagttatttttatattgggtttttagtttgtggtataagggattttttgatgttaaaggttaaagggaaatttttgaaattgtttttattttggttaaattaaaaattatagtgtgttttagggtgggttttgtgaaggatattgtaagtattgtgggggttatattattattataaagttgaaggaggcggggtggtgttgaggttgtttattgttttcgtgtaatttagtaatttgtttttgaggaagtttagtgaggtttaaagaatgaatgagattattttagatatggttaagtaggagttataagtgtagtttttgtgttgtttggatattattggtagagtagattaataaagttttgggtatatagtgtgtagttgtggatttggtgagtgtatttttttttattttagttataaagggtatatggagtgatttatatttatgtgggatttataatatattgaattatagtttgttttaggatttttgtaatttttttgttttttatagtatagttttatgattatattagatatattggatattttaaaggatattaaattagtttattttatttataattttatgttgattggggcgaatgagtagtaggtagaaagtgtattggtatcgttggtaaaatatttgtattttagaaggtgaagataaattttatagagttttaggaaaggttattgtagtgaagttttatgagtttagtgtttaggggaatgtaggggtgtttttttttaggtaaattataaagtgttgtattttgtatttttagtgtaaaaaaagaaagtatatttttcggtgagttttttggagttttgacgatagtatattttatatgtagaaatgttgttttggtttatattttaggtgatataggaggaggttagttttaagtgaggtttatataggaaagtattttgtagtagatataggttgcggtgtagttattattttttagattttttggtattggaaggggtaggggtggggaaagatgtaggatggagttgaattaagtagtagtgggagagttatggtggagggtttgggatttggagtaagattatgttatttatagtagagatatggttttttattagaagtaatttttagtgtttttggttttgattcgatagaatgtttaattataggatattaagtaatgatgtgattttaagtatttgtgtgaattggtttttgtgtgatttagaaagttatagattggataggtttaatagtatttattatgaggtgaaaatggtttatttgggttgtgtttgaattttatgttgatatttttagaaaatatttaagtttgaagtagtattgaataattaaatagataaatggaagttagttagtttttattatgggttaacgtaggtttggtaggatgggtatatgaatggagtaagtatagtggtaggtttgaggttatatatggggttagaagtattgattttttattattaagatagatttagttgttgttatttttgaatgtttaatttattagtatttgaggtttattatgtgttttcgtggggtattatttttttaggtgattaattagttattatgtaataagttgattatatttagttatttttattttagaagggtttgaggtttatttttataggggtaggtttatattttatgggtgagtttttttgttttgttttcggatatttagttagtattattttttgggtgttgttgatatttttgatttataggttaggcggtgtttttaatttagtatttgtttgaaggatttatttggtagggaaagttttagtgttttcgtggttatgggttttattgatttgattattatttgtattatttaggggttgttagttataaggaatgttggaaatgttttttataggtaaaatttagtgttattttggaggaagtattttgaggggtgggggtcgttttttaggatatggtgtattgtttgaattagagatatttttacggtgttgtgtttttaataggaagaagatgtgggtttagaaatcgaaagttggaagtaggtttgtttttatgtttagttttttagatttatttattggggtattttgtacgttttattttttaattttgggttgtttagggtaggaggtttttaaaaggagatatatgatagtttattgaattatatattatggttgttattagagaagtttggatagtatgtgtttagagattagttggtgagaaaaggagtttttttttttttaggtgtaggtaatagattttgatttttaggaggaggtatggttatttttatataatgagggtagaagtgtgtgtgtgagaattagagatttatttgggggttttttggtttgttttgtttttttgtaaatgtgagtagaattatttagtaatttagtttgagaggatttgatttttaagggtttagattttttaggataggaggtttgagttatatttttgggtaattatttaaggttttatttttgtgttttgatatttttagtgttattggtgtagagattttgttttttatgggttgtttttagttagtgatgggttatattagtgatattgaggtaggatatttttgggagattagggatttttttgacggatagtagtggtttaaagatttttttatggttttgtttaatttttttgagattgtttgtggtttaggatatatttagtaaattttttgtttttttgtttattattgggggttatatttgtattttggtttgttgttttttttagggtaatttgttttcgttgttatatttttgataggtgtgttttttaataaaattttgtaattttaattttatgatggtatttggaatgtaaaattatttttatttgtatattagtgattttttatttattttaatttgtaaaatttttttgtttgtttaattttttttatttgtattggttttattttgttagtatttgtattatgtttttgagatagtcgatgtttgttgttttaagttattaaatttgggggtagtttgttatatagtaatggataattaatgaagtttttttatatttttgttattttatagaggttaaatatattcgttttatttttttttattttgataatattagttatatattgggtttttagtttttttacgtttgtttttttttttattttcgtttttttttttttttattttttttttttttttttatttttattttttttttttttttttttttttttatttttatttgtttttttttttttttttttttttttttttttttttgttttttttatttttttttttttttttttttttttttttttattttttttttttttattatgatatattttgatatataaaataattttatgtgtttgtattataaggaaatattttttgaatttatatgttaaaagtataaagttatggtatataggatataagttaataataggaagttattaatagagtttgaataagaatgtttgttataggttgggtatggtgatttatgtttgtaattttagtattttgggaggtttagacgggcggattacgaggttaggggatagagattattttggttaatacggtgaaattttgtttttattaaaaatataaaaaaaaaattagtcggtgtggtggcgggtatttgtagttttagttatttaagaggttgaggcgggataatggcgtgaatttaggaggtggagtttgtagtgaatcgagattgtgttattgtattttagtttgggtgatagagtaagatttcgttaaaaaaaaaaaaaaaaaaaaatttgttataattttgtagttaaggtagttgttattaatttttaatttttttaatttagtgtttttagaatatattaatattatatattatatatttattgtaaaagtttaagttggtataattattttggaaattatattattattatttagtatggttaaaggttatataatatattatttaattattttatttttaattatatattttggcggttttttcgtttatgtgtttaggagatatgtatattaatgtttatggtaaaaattggaattagttttttatatattaatagtaaagtagtgaaattgtgatataattataaaatgtaaatttttagtagtaaaaatgagtgaatgatagttttttatataatagataatttttatatataatgtgtattatgagaaaagaaatgtagtaggaatttttgtataggaagtttaaaaattagtgaaattaatatttggtttgagattatatatatttattgtataaatatttaaagaaatataaagtaataataaaaataagatttaggatggggttttattttgggggatgtgattgggtagtagtttagggtggttttgcgggttttgtgttttacgttagtgttgggaatttaggtaattattagattataattttttaaatagtattttttaaattaaaatatatttgttttttaaaaaatgaaagaaaaaaatattaaagtttattgtaaggatttttaataagaattatttatattggaagaaaattatagagaattgtaaggagttatatgatagagaggttttttataggatgttatgataatatttttggttaaagggttatatgatttttggtttataggtatttttttagatttttaggtatataagatttaatttgatgtgtaaggtaattttattttgtaaaggatttgatttgttatatattttatatatataattgaattaaatttttatagaattggaaatgtatattattgattaaaatagatgaaataataaaagagtataaaggaataattagtgatggaatagtaaatatgaatggaaaatataataggattgtttaaaaaaatttgaaagtataaaattgtagtgttatttagaattatagtggtgtttaaattatttttattatatttgatttaatattagaataaaagatgttaagtttattatagaatgtttattaaatagttagtttttgaaaaattttatgttttagttggagttaattattttgggttattgtatttaattaaagttattgatattttgttaagttagatgtgttaattgaggtatgagatttatatttttgtaaattaaaattaattaggtaaattttttaaagtgaaattaagtttatgagagaagtaaggaaataaaagaatggttatttaatagatataatagtttttttttttaagtgtaggtaaatgttttttgaagatgatattttaataagaaaattggtatttggggtatattttaattaaatgtgagatattttagttgaaataaagatttatttttaagttattatttttacggtatagaagtttttggaatatttgttttagttattttgggtttttaattgttgatttattgaagagaatattgttattaaaggtatttgtaagaaaaatttagatatattattgtattttttttttttgttttaaattgttttttttataatatttaaggttttgtgatgttttaaatttttaattattaatttaaaaagagaagtttattatagaattagaagaaattattttaaaatttatatggaattaaaaaagagtttatatagttcggataattttatataaaaagaataaagcgggcggttttagattatttgattttaaattatattataggttatagtaattaaaatagtatggtaatagattaatggaagagagtagagaatttagaaataaaatcgtatatttaaaattatttgatttttaataaatttgatgaaaataagtaatagggaaatgattttatatttaataaatgatgttgggaaaacgggttagttatttgtagaaaattgaaatcggattttttttttatattttatataaaaattaattttagatggattaaagatttaaatgtaaaatttaaaattataaaaatttaagaagaaaatttaggtaatattatttgtttgggtatgggtaaagattttatgatgaaatcgttaaaagtatttgttataaaagtaaaaattgataaatgggatttaattaaattaaagagtttttgtataggaaaagatattgtgattagagtgaatagataatttatagaatgaaagaaaatttttgtaatttatttatttgataaagatttaatatttataatttataaggaaattaagtaaatttataagaaaataataaataattttattaaaaagtgggtaaatgatatgaatagatattttttaaaagaagatatatatgtggttaataaatatatgaaaaaaagtttattattattggttattagagaaatgtaaattaaaattataatgagatattattttatgttagttagaatggtgattattaaaaagttaagaaataatagatattggtaaggttgtagggaaataggaatgttttaattgttggtgggaatgtaaattagtttaattattgtggaagattatattgtagattttttaaagatttagaattagaaatattatttgatttagtaattttattattgggtatatatttaaagaaatataaattattttattataaagttatatttatgtgtatgtttattgtagtattatttataatagtaaagatatggaattaatttaaatgtttattaataatagattggataaagaaaatatattatatgtatattatggaatattatgtagttttaaaaaggaaggagattatgttttgtagggatatggaaaaagttggaagttattatttttaataaattaatgtagaaatagaaaaataaatattgtatgtttttattgataattgggagttgagtaatgagaatttatgggtattgggaggggaatattgtgtttttttgggggagggtagaggtggggtgtgtattaggaaaaatagtttatttatgttaggtttaatatttaggtgttgggttgataagtgtagtaaaatattatggtatacgtttatttatgtaataaatttgtatattttgtatatgtattttgaaatttaaaataaaaattaaaaagaagtttaaagtattaaagaaaaataattatatgaaagaagtatttgatttataaaattttgaaataataattttaattttgtttttaatatgtatgtaaattttttgatattttttttttttaatggtgtagtttaattttttttttgtgagttcggtttggatttaatgatgtatttttgatatggttttattttgtgtttttatttaaatttattttgaattgtaatttttacgtgttaggggaaagatatggtgggaagtgattagattatggggatggtttttttatgttgtttttatgatagtgagtgagttttatgagatttgatggttttataagagttttttttgttattttcgttttttataattttgtattttttttttttattattatgtgaagaatgatatgtttttttttttttttgttatgattgtaaattttttgaggttatttttttagttatgtagaattgtgagttaattaaattttttttttttataaattatttagttttaggtatttttttatagtagtgtgagaatagataaatataatttttaattgatagagtagtgttgatataatagtttttgattttgggtgtagaatataaaatttattgtagtttttttttttttgtttttgggattatgagttttgggggaagttaattgttgtgttataagtagttttgtaggaaggtttatgtggttaaaaattgaggttttttgggattagataataaggaattatgtgagtgagttatgttttatgtaaattttaagttttagtgaagtttttagacgatgtagttttggattggattgtaattttgtgagaggttttgagttagaagtatttagggaaattttgtttttggatttttgattattgaaaattgcggtagatgatgtttgttgttttgcgttgttaagttttatgtaatttgttatgtaatagtaaataattaatatatttttataagagaggatgatttattgtattttaatttttatttgttttaaatttatgattatgattattattatttttgagatagtattttgttttgttatagaggttagagtgtagtggtatgtttattatttattgttgtgttgattttttgtgtttaaatattttttgattttagttttttgagtagttggttgggattataggtatgaattattatgtttggataatattttaatgtttttgtagagatggaggttttattatgttgtttaggttgattttaaatttttggagttaatggatttgtttttttttgttcgttatagtgttaggattggaggtgttagttattatatttggtatgaattaattataagttattaaatttgttatttgattgtaagaggtaaggtgaatttttatggttgaagaggatgtattttattattatttataatgatcgttttatttgaattttaatttttaattgtgttttaattaaatataaaaggaaaatttaatttttgttaggttgattttataatagttttaataattagtttttggttatttatttttttttaattatttaattaattttattgtaggtgttgttgtgaagggatttagtagatataattaaggtttttaattagttgatttgaggttgggtttagtttgtttggatagttttaattaggtgagtttatgaaaggattgggttttttttgagtatagagatttatagtgtgagagggatttagtgtgaggggttttttttattgtgggttttgaaattgaaggggttgattagaaaagaatgttgtttggtttttggtattgagtatagtttttttttttttttattttgatagttagtagggaataggaaatttagttttaacgattgttagaaattgaattttgtcgtttttatatatgtttgaaggaggatttaaaatgaaaatatagttttgggaagttttgaatagagatttcgtttatattatgtttggatttttgtttaaagaattgtaaatagattagtggatgttgtttgggtaggtgtggtagtatatatttgtaattttaatatttgaggggtttatataggaggattatttatatttaggaatttgagattagtttgggtaatgtaatgagatttttatttttataatttttttttttaattagttgggcgtggtggtatttgtttgtagttttagttattttgaagattgagttaggaggattttttgagtttaggattttaaggttgtagtgagttatgattgtgtgattgtattttaaaatggatgagagaaagagattatttttttaaaaataaatgaattaattaaataaatgggtattgtttaaagttaatatttgtgataatttgttgtgtagttataaaattcgtatagttttaatagataaatggaatgaatttatgaattgatatgtatattagttatataaaataaaaatttttttaattttttttagtattgtttattttataattttttgtgatgaaattaaattttaatatatttatattttatttatttagttaataaaaattaattcggggaataggaatagttttagtttatagtttttagggtgagtaacgtagaagacgaatgatttttgtatttttaattgaggtattaggtttattttattggggattgttagatagtgggtgtatgatattgggtgtagtgtattaagtgtgagttaaagtagggcgaggttacgttttatttaggaagcgtaaggggttagggaatttttttttttagttaaggaaaggggtgatagatggtatttggaaaattaggttatttttattttaatattgtattttttttatggttttagtaaacggtatattaggagattatattttatgtttggttcggagggttttacgtttatagagtttcgtttattgttagtatagtagtttgagattaaattgtaaggtggtagtaaggttgggggaggggtgttcgttattgttgaggtttgagtaggtaaataaagcggttaggaagttcgaattgggtggagtttatatagtttaaggaggtttgtttgtttttgtagattttatttttgggggtagggtatagttaaataaaaggtagtagaaatttttatagatttaaatgtttttgtttgatagttttgaagatagtagtggttttttcgtatgtagtttgagatttgagaatagatagattgtttttttaagtgggtttttgatttttaagtagtttgattgggaggtattttttagtaggggtagattgatacgttatacggttaagtatttttttgagataaaatttttagaggaaagattaggtagtaatatttgttgtttattaatatgtattgttttgtagtttttattgttgatatttaggtaaatagggtttgtagtggatttttagtaaattttaatagatttgtagttgagggttttgattgttagaaggaaaattaataaatagaaaggatatttatattaaaattttatttgtacgttattattattaaagattaaaggtagataaatttataaagacggggaaaaaatagagtagaaaaattgaaaattttaaaaattagagtgtttttttttttttaaaggaatgtagttttttattagtaatggaataaagttggaaggagaatgattttgataggttgagagaagaaggttttagacgattaaattttttcgagttaaaggaggaagttcgaatttatgataaagaagttaaaaattttgaaaaaagatgagatgaatggttaattagaataattaatgtagagaagtttttaaaggatatgatggagttgaaaattacggtacgagaattaagtgatgaatgtataagttttagtagttgattcgattaattggaagaaaggttattagtgatggaagattaaatgaatgaaatgaagtgagaagagaagtttagagaaaaaagaataaaaagaaatgaataaagtttttaagaaatatgggattatgtgaaaagattaaatttgtatttgattggtgtatttgtaagtgacggagagaatggaattaagttggaaaatattttgtaggatattatttaggagaatttttttaatttagtaaggtaggttaatatttaaatttaggaaatagagagaatataataaagatattttttaagaagagtaattttaagatatataattgttagatttattaaagttgaaattaaggaaaaaatgttaagggaagatagagagaaaggtcgggttatttataaagggaaatttattagattaatagttgattttttagtagaaattttataaggtagaagagagtaggggttaatatttaatttttttaaagaaaagaatttttagtttagaattttaaatttagttaaattaagttttgtaagtgaaggagaaataaaattttttatagataagtaaattttgagagattttgttattattaggtttgttttataagagtttttgaaggaagtattaaatatggaaaggaataattggtattagttattgtaaaaatatgttaaatagtaaagattattgaggttaggaagaaattgtattaattaatgagtaaaataattagttaatattataatgataggattaaatttatatataataatattaattttaaatgtaaatgggttaaatgttttaattaaaagatatagattggtaaattggataaagagttaagatttattagtgtgttgtatttaggaaatttattttacgtgtagagatatatataggtttaaaataaagggatggaggaagatttattaagtaaatggaaaataaaaaaaggtaggggttgtaattttagtttttgataaaatagattttaaattaataaagattaaaagagataaagaaggttaatatataatggtaaagggattaatttaatgagaagagttaattattttaaatagatatgtatttaatataggagtatttagatttataaagtaagttcgtagagatatataaagagatttagatttttatataatagtaatgggaaattttaatattttattgttaatatcggatagattaatgagatagaaagttaataaagatatttaggaattgaatttagttttgtattaagtagatttaatagatttttatagaattttttattttaaattaatagaatatatattttttttagtattatatcgtatttattttaaaattgattatatagttggaagtaaagtattttttagtaaatgtaaaagaatagaaattataataaattgttttttagattatagtgtaattaaattagaatttaggattaagaaatttatttaaaattgtttaattatatggaaattgaataatttgtttttgaatgattattgggtataaaacgaaaggaaggtagaaataaagaggttttttgaaattaacgagaataaagatataatatattagaatttttgggatgtatttaaagtagtgtgtaaagggaaatttatagtattaaatgtttataatagaaagtaggaaagatttaaaatcgatattttaatattataattaaaagaattagagaagtaagagtaattatatttaaaagttagtagaaggtaagaaataattaagattagagtagaattgaaggagatagagatataaaaaattttttaaaaaattaatgaatttaggagttgattttttgaaaagattaataaaattgatagattattagtaagattaataaagagagaagaattaaatagatgtaataaaaatgataaaggggatattattattaattttatagaaatataaattattattagagaatattataaatatttttatgtaaataaattagaaaatttagaagaaatggataaatttttcgacgtatatatttttttaagattaaattaggaagaagttgaatttttgaatagattaataataggatttgaaattgaggtaataattaatagtttattaattaagaatagtttaggattagatggatttatagtcgaattttattagaggtataaggaggagttggtattattttttttgaaattattttaattaatagaaaaagagagaattttttttaatttattttatgaggttagtagtattttgatattaaagtcgggtagagatataataaaaaaagagaattttagattaatatttttgatgaatatagatgtaaaaatttttaataaaatattggtaaatcgaatttagtagtatattaaaaagtttatttattatgattaagtgggttttatttttgggatgtaaggttggtttaatatacgaaaattaataaatataatttagtatttaaatagaattaacgataaaaattatatgattattttaatagatgtaaaaaaggtttttgataaaatttaataatttttatgttaaaaatttttaataaattaagtattgatgggacgtattttaaaataataagagttatttatgataaatttatagttaatattatattgaatgggtaaaaattggaagtattttttttgaaaattggtataagatagggatgtttttttttattatttttatttaatatagtgttggaagttttggttagggtaattaggtaggagaaggaaataaagggtatttaattaggaaaagaggaagtaaaattgtttttgtttgtagatgatacgattgtatgtttagaaaattttattaatttagtttaaaatttttttaagttgataagtaattttagtaaagttttaggatataaaattaatgtgtaaaaattataagtatttttatatattaataatagatagatagttaaattatgagtgaatttttatttaaaattgttataaagagaataaaatatttaggaatttaatttataagggatgtgaaggatttttttaaggagaattataaatttgtttaatgaaataaaagaggatataaataaatggaagaatattttacgtttatggataggaataatttatatcgtgaaaatggttatattgtttaaggtaatttatagatttaatgttatttttattaagttattaatgattttttttatagaattggaaaaaattattttaaagtttatatggaattaaaaaagagattatattgttaagagaattttaagtcgaaagaataaagttggaggtatgacgttatttgattttaaattatattataaggttgtagtaattaaaatagtatggtattggtattaaaatagagatatagattaatggaatagaatagaggttttagaagtaatattatatatttataattatttgatttttgataaatttgatagaaataagtaatagggaaaggtgttgggaaatttaataaatggtgttgggaaaattggttagttatatgtagaaagttgaaattggattttttttttataatttatatagaaattaattttagatggattaaagattttaatgttagatttaaaattataaaatttaaaagaaaatttaggtaatattatttaggaaattagtatgggtaaggatttcgtgattaaaatattaaaagtaatggtaataaaagttaaattagataaatgggatcgaattaaattaaaaagtttttgtatagtaaaagaaattattattagagtgaataggtaatttatagaatgggagaaaatttttgtagtttatttattaaataattttataaaaagtgggtaaaggatatgaatagacgttttttaaaagaagatatttatgtagttaatagatatatgaaaaaatgtttattattattggttattagagaaatgtaaattaaaattataatgagatattattttatattagttagaatggtaattattaaaaagttaggaaataataggtgttggagaggatgtggagaaataggaatatttttatattgttggtgggattgtaaattagtttaattattgtggaagatagtgtggtaatttttgaaggatttagaattagaaatattatttgatttagttattttattattgggtatatgtttaaaggattataaattatgttattataaagatatatgtatatgtatgtttattgtggtattatttataatagtaaagaattggaattaatttaaatgtttattaatgatagattagattaagaaaatgtagtatatatatattatggaatattatgtagttataaaaaggatgagtttatgttttttgtagtgatatggatgaagtaggaaattattattttgagtaaattattacgaagatagaaaattaaatagtgtatgtttttatttataggtgaattgaataatgagaatatttggatataggatggggaatattatatattggggtttgtcgtcgggtggcgggatgggggagggatagtattaggagaaatatttaatgtaaatgattagttaaagagggtagtaaattaatagggtatatgtatatatatgtgataaatttgtacgttatgtatatgtattatagaatttaaagtataattttaaaaaaatgtaagagaaaagaatattaaagttaattgtaaggatttttaataagaattatttatattggaagtaaattatagagaattgtaaggagttatgtgatagagaggattaggatgttaagaaaatggatttggttaaaaataggttatttaatttttggttgattggtatttttttagatttttagttatataatgtttaatttgttgtgtaaggtaattttattttgtaaaggatttgatgttatattttattatatatataattgaattaaatttttacggaattggaaatgtaaataattgattaaaataaattaaataagaaaagaataggaaggaataattagtgatggaatattaaatatgaatggaaaatagaataggattgttaaaaagaaaaaaaattttagaagtatataatagtcgtgttatttagaattatagtggtgtgtaaatgatttttattatattttatttaatattagagtaaaagatgttaagtttattatgtaatgtttattaaatagttagtttttgaaaaaaatttgttttttaatttgagttaattattttaggttattgtattaaattaaagttattggtattatgttaagttagatgtgttgattgaagtatgagatttatatttttgtaaatgaaaagtaatttgattaggtaatgtttttttaagtgaaagtaagttattagagaagtaaagaaataaaagaatggttattttatatagtggagtttttgttttttttttttaagtgtaggtaaatgtttagtgaagatgatattttaataagaaaattggtgtttgggacgtgtttttattaaatttgagatattttagataaaataaagttttatttttaagatattatttttattagattgaagttttggaattatttgatttagttattttatgtttttaattgtgttaattaattgaaaataatattgttattaaaggtatttataagaaaaatttagagttattgttgtatattttttttttgttttaaattgtttttttttaagtatttaaggttttgtgatgtttgaaatagttaattattaattttaaaagataagtttatcgtggaattagaaaaaaaaattattttaaaatttatatggatttaataagagtttatatagtaaagagaatattaagtaaaaagaataaagttggaggtagtatattattttatttaaaagtatattgtgaggttatagtaaataaaatagtatgatattggtataaaaataggtatatagattaatggaatagaatagagaatttataaaaaaagttcgtatatttataattatttgatttttaataaatttgataaaaataagtaacggggaaaggattttttatttaataaatggtgatgggagaattggttagttatatgtagaaaattgaaattagattttttttttatattttatataaaaattaatttaagatagattaaagatttaaatgtaaaatataaaattataaaaattttgaaagaaaatttaggtaatattatttaggatataggtatgggtaaagattttatgatgaaatcgttaaaagtatttgttataaaagtaaaaattggtatatgggatttaattaaataaaagagtatttgtatagaaaaagaaattattagagtgaatagatattttatagaatgggagaaaatttttgtaatttatttattttataaaggtttaatatttagaatttataaagaatttaagtaaatttatatgaaaaaaaattttattaaaaagtgaataaaggatatgaagagatattttataaaataagacgtatatgtggttaaaaaaatatgaaaaaaagtttaatattattgattatagaaatgtaaattaaaattataaatgagatattatttaatgttagttagaatggtaattatttaaaattatataaatattagatgttggcgaggttgtggagaaataggaaggtttttatattgttgttggaaatgtaaattggttgaattattgtggaagatagtttggtgattttttaaagatttagaattagaaatattatttgatttagtaattttattatagggtatatatttaaaggaaaataaattattttattataaagatatatgtatgtgtatgtttattgtagtattatttataatagtaaagatatggaattagtttaaatgtttattaatgatgtattgtattaagaaaatatggtatatatatattatggaatattatgtagttataaaaaggaatgagatttagttttttgtagggatatggatgaagttggaagttatttttagtaaattaatataggaatagaaagttaaatattatatgtttttatttataattgggagatgagtaatgagaatatatggatataaggagaggaatattatatattggtgtttgttgggggagggtagtggtgggaggagtattaggaaaaaatagttaatgtatgttagggttaatatataggtgatggtttgataggtgtagtaaattattatggtatatatttatttatgtaataaatttgcgtattttgtatatataatttggaatttaaaattaaattaaattaaaagataagttaaaagggttaacgaaaaataattagataaaaaaattttgatttttaaaattttgaaataagagttttaaatttgtttttaatatatatttaaattttttaatattgtttttttttagagatgttgtttaatttttttttttgagtgtggtttggatttaatgatgtatttttgatatggtttggttttgagtttttattaaatttttattttgaattgttatgtaaattgtaatttttatgtatcgggggagggattttttgggaggtgattggattacgggtatggtatttttatgttgtttttatgatgttgagggaatttttatgagatttgatggttttatgaggtatttttttttatttcgatttgtaatttttttttttgttattatgtgaagaaggacgtgtttgtttttatttttgttatgattgtaagttttatggggtagtttttttagtaatgtagaattatgagttaattaaattttttttttttataaattatttagttttaggtatttttttatagtaatgtgagaacggattaatataatttttaattggtaatgttgatataatagtttgtgattttgggtgtagaatataaaatttattgtagtttttttttttttttttaatgtttttggaattatgagttttgggggaagttatttgttgtgttataagtagttttgaaggaaggtttatgtggttgagaattggggttttttgggaatagataataaggaattagggtttttttaatagttatgtgatttatttatgttttatgtgaatttttagttttagtgaagtatttagatgatgtaggtttaggttgataattggattgtaattttgtgagaggttttgagtaagaagtatttagggaaattttttttggatttttgattattggaatttgcgggagatgatgaatatttgttattttgagttgttaagttttatataatttgttatgtaatagtaaataattaatatatttttataaaagaggatgtagtattatatattaatttgtatttgttttaaatttattattattattaatattattgttattgagatagggtttcgttttgtcgtttaggttggagtgtagtggtatgattattatgtattgtagtgtcgattttttgggtttaagggatttttttattttagcgttttgagtaattgggattataggtatgaagtattacgtttggttaattttttaaatttttttgtagagatgggggtttttttatgttgtttaggttgatttttaatatttggagttaataaatttgtttttttttgttttttacggtgttagaattataggcgtgagttattatatttggtttaaattaattataagatattatatatgtaatttagttttaaaaggtaaggagaatgtttatggttgaagaggatgtattttattattatttataatgattattttatttgaattttaatttttaattgtgtttaaattaaatataaaaggaagatttaatttttgttgggttgattttttgatggtttttaatagttatttttcggttatttatttttttttagttatttaagtaattttagtgtagatgttgttgtgaagggatttagtagatataattaagggttttaattagttgattttaggttgggtttattttgttttgattgttttaattaggtgagtttttgaaaggtttgtgttttttttgagtatagagatttgtagtgtgagagggatttagtatgaggggttttttttatcgtgggttttgaaaatgaagaggttgtgtaggaaagaatattgttaggtattaggaattgagtatagttttgtttattttttgtattgatagttagtaaggaatagaaattttagttttataattgttagaaattgtattttgttatttttgtataagtttgaaggaggatttaaaatgaaaatatagtttttggaagtttagaatagggattttatttatattttgtttagatttttgattaaggaagtataagtagataaatgggtgttgttttgttagtcgtggtagtgtacgaatgaattgatgaattgatatgtatattaattatataaaataaaatttttaatttttttagtattttatattttataattttttgtgatgtaatttaatagatttatattttatttatttagttaagaaaaattaatttaatttttataatgaattaggtgtgtttttatatgtttacgtgtttgatattttagaagttttataagattaaggtggagttagtggaatgttttaggtggagaaatgatatattttgatttataggagtaggattattgtgtagagaatagttacgtagtaggtaatgggatagtgttagtgttataaataaggagtgataaggtggtggggattaaggggagaggagggtttgagggatgagaggaatggagggaagggttggagatgtaggaggtgaggaaatggagtagagggaaagaattcgaaagtagtagaatttaggtttaaatatattgttttatatattttaatatattaatttatagagttttgtagggtgatttttgtagttggtttttaatattttatgtgggtttgtttaaaaattaatttttttatgttaattaggtttaaaaaatattaagtgtttatataaaatatatataatatttagaagtggatattttttaaaaataggtagtgtatgagtattggtgaggggtattgtgattgtattgagtgtttgttattgtgaggtgaataaagtttgtattggtttttggttataatatatagtaatatagtggttattttgtattaggagatgttttggatttatatagaaatttagggttatggaatgaaggtaaatttaaaatattataagcgggagttatagatatattgtttgggaaagtgaaatttaggagttttgtgatttttgttgtaatgtttttagatatatttatatgttaagggattaaagttatatttttggttaattagatttttgattattaggagttattaagattttgttatttattgtagttaataaataaaaagtaaattggtttttattttattttatgtatttaggtataatttttttagatttaaaaaataaataaataataataataaaaaattttgtttttatatttttatttttagggtaagtttattttttggtaataagttttttggagtgattttttttttagaagagtttacggggataggtaaggagtaggaggtagggagtttagttttgggacggggatttcgtgatgtaaagtgaagagagaggaacggggtttatttcgagggtttttttttggttttttagatagtttttgggttaagattcggaaacgttgagatagagcgtttggtatagaagtagcggggttagggcgaagttttagggttttaggtatggtttttaggattttaggttttaaaggcggtgtatggattggggaggtttagcgttggggattttttattttcgtagggtttttttttttttttttttaatttgtgtcgggtttttttttttggatatttattaggttgttttagtttttatttttattgagtgtcgggtttttagagaagttaattaatgtagtcgcggtttcggttttaaagtttttacgtatttatcgggatttcgattttttttagtcgtcgaggatggtgttatggcgtttcgaattttgtttttgttgttttcgggggttttggttttgatttagatttgggtaggtgagtgcggggtcgggagggaaacggtttttgtggggagtagttaggggtttgttcggcgggggcgtaggaattcggttgcggtgtcgggaggagggtcgggagagttttagttttttttttgtttttaggtttttattttttgaggtatttttatattattatgtttcggttcggtcgcgcggattttcgtttttttttcgtgggcgacgtggacgatacgtagtgcgtgcggttcgatagcgacgttacgagttttaggatggagtcggaggggtcggaatattgggaagaggagatagggatcgttaaggttaaagtatagttttatcgagtgaatttgcggattttgagcggttattataattagagtgaggtttgtgagtgatatcggtcgggggcgtagattattatttttttatattttttacggatcgttcgggttttttcgagtttttgggttcgagatttacgtcgaggtagcggaatttggagattttttattcgggagaggtttaggagtcgttattcggttttatttttagttaaaattttcgtaggttggttttggcgggggcggggttcggtgggcggggttggtcgcgggggcggggttagggttttatatttatttagaggatgtttgtttgcgacgtggggtcggacgggcgtttatttcgcgggtattattagtttgtttacgatggtaaggattttatcgttttgaacgaggatttgtgttttttgatagtcgtagatacggcggtttagattatttagtttaagtgggaggcggttcggggggcggaggtttatttttatagggataggtatttattagatgtggtgtggtttttttttttatttttagatttttagttagtattattattggtatttttgagttattggtttagaattttagtatattatttgttcgcgggatatattttagagggaaggggatgaagcgtgggttatgatgattatggaattttttggttttattattatttgtattttttaggggttgttagttatatagagttatggataggtttttatagatataatttagtgttagtttggatgaaattttttgaggaatggttgttattttttaggatgtggtgtatgtattgaattaaagatgtttttatagtgttgtgtttatagaaggaagaatacgtgggtttaaaaattaagaagtagaagtaggtgtggttttatatttaaatttttatatttatttttagggtgattttgtattttttatttttaatatttgggttttgtaggggaggaggttttggttttttaaagggggtattttggtaaggagatatttaaatgagagtttatggaattatattttatggttgtttttagggatgtttgaatagtatgtgtttagatataagaaggtgagaagaggaggaggtagggttgttattatataaggagggtaggagatgtgtgtgtggaaataagagatttatttggagattttatggttttttttgttttgttgtaagtgtgagtagaattatttagtaatttagtttgagagggttttatatttaagagtttagaatttttaggaaggaaggattgagcgatatttataggtaatgttttaaggttgtgtttttgtgttttgatatttttagtaggattggtgtaaagttttgttttttatgggttgtttttagttagtgattggttatagtaggcgttaaggtaagttatttttgggagatacgggatttttttgatggttaattgtagttggaaggtttttttacggttttgtttaattttttttagattgtttgtgttttaggatgcgtcgaataaattttttttttttttgtttagtatttggggttatatttgtatcgtggtttgtcgttttttttagggatttttggtttattttttatatttttttacgggtgtgtttttttataagatgtcgtagattttaagtttattttggtatttgttttttgaaggatttggattaaaaattatttttatttgtatattaataatttttattttaatttgtaaaatttttttttttatttaatttttgttatttttatagaatttattttatttgtgtgtgtagtatttttttgagttaatagatatttgttttattaagttattaaattttgaggtagtttgtgatatagtattagataattattaaggtttttttaagtttttattttttatggatattatttatatattttttaattttttgtattttaataatattagttatatttgttgtttttaattttttttttttatttttgaatatttttaaattttgtttttttttgtttttttttttttttttttttttttttttttttagagttttttttttttttttatttttttttataaattttaagtgtttaggttaaaaggaagtattatttgaattttatgttaaaagtataatgtcgtaatttataatataaaagtaaagaaaaggaagttgttaatggaatatgaaaaaatgtttagggtgattttatagttaagatagtattttttaatatttaatttttgtttttaattgaatgtttttagaatatatgagtaatataagtttttttttatttttggtataagtatttgagaaattaaattagttttatttagtatgattaatgtttatatattatataattttattatttgttttttgattatattttttggggatatttttggttatgtgtttaggagatatgtatattaatgtttatggtaaaaattagaaataattatatatatattaatgggaattaataaaattgtcgtataataataaaaagtaaaattttagtagtaatagtgaatgaatagtatttttttatattagagataatttttttatatataatatgtattagtattatagaagaatgtatattgtgtgagttttttgtacggggaagtttaaaaaagtaggttaaattgtgatttggatatatatatatttattgtaaaaatttttagagataatgaaaaggaatagtaaatataagatttaagatagaagttttttttggggaatagaattggataatagtcgagggtggttttataggttttgttttttatgttaggaggggatgtttaggtagttaagttatttgattataaatttttatttatttatttatttatttattttcgagatggagttttttttttgttgtttaggttggagtgtagtggcgtgattttagtttattgtaattttcgttttttaggtttaagtaatttttttattttagttttttgagtagttggaattataggtatttattacgatatttaggtaatttttgtatttttagtagagacggggttttattatattgtttaggttggttttaaatttttgattttaggtgatttattaatttcggttttttaaagtgttgggattatagatatgagttattattttcggtttataaatttttaaagtgttattttttaaaatgtattttgtgtgttatttttgattgattatttggaaatgaaagagaaaagaaaatattaaagtttattttaaggatttttagtaataattatatacgttaaaataaagttatagttaattgtaaagagttatgtgatagagaggattaggattttatgaaaaatagttttggttagaaagaggttatttgattttgggttaattggtaattttttatattgtttggtatatagtgtttaatttgatgtgtaaggtaattgtattttgtaaagaatttgagaatttgatatgttgtttatattttattatatatataagtggattaaatttttatatagtaaaaaaaaaagtattgttgagtaaaataaattaaatgaaaagatataaaggaataattagtgatgaaatagtaataagaatggaaaatatgaaagagatgtttgtatagtaatgatagtagtataaaagaatagtgttttttagaattatattggagtttaaattatttttattatatttaatttaaaaatatagtgaaagatgttaaatttttataggatgtttattgaatagttagttattgaaaaattttgtttttagattggagtaaataatttttgtttattttagttaaataaattattgttatgatgttaagttagtgtatagatagaggtgtgagatttatatttttttagttgtaaagtattttgattaggtaaatatttttgtagatgtttgagtaagaaaattggtattttgggtatttttaaatcgaattagaaatttttgaagagaaataaatatagttacgattgtaaaggtattattgtatggtattaaagttttgggatattttaatttagttattgtatttttttaattttgttgtaatttattaaagagaatattaatattaaaggtatttataaaaaaaatttgagatattgttgtattttttttttttgttttaaatatttaattaattttatagaagagaattttaaagtattaaaaaaagttagatataagaagtatttgatttataaaattttgaaataataatgttaattttgtttttaatatgtttataaattttttgatattttttttttttagaagtgtagttttattttttttttgttcgtgtagtttggatttaatgatttatttttaattgatagagtaatgttgatttaatagtttgtgattttgggtgtagaatataagatttattgaagtttttattttggttttttttttttttggaattatgagttttgggggaagttggttgttgtgttataaggaggtttgtggtttatgtgattaggaagtgagtttttttgggattagataataagaagttaaagttttttttaaaagttatgtgagagatttttgtgttttgtgaatttttggttttatttgagtttttaggtgatttagttttggaagataattagattgtaacgttgtgagaggttttgagttagaagtatttagagaaattttttttggatttttgattatggataattgtgggagatgataaatatttgttgatttgagttgttaagttgtaggtgatttgttatgtagtagtagataattaatatagttttataagagaggatgaattattgaatttttttatttgttttaaatttattataagatattaaatatgttatttgtttttaatatttaataaaaatttttatggttatataagatatattttattattattaataatgatttattttttgatttttaatttgtatgttttatttaaatatgaaaggaagatttaggttatgttaggttgattttatgatgatattttaataattatttttggttatttaggttattttagttatttagttgatattaaagtaggtgttgttgtgaagaggttttgtagatatatttaaagtttttagttagttgattttaagatgaggattattttgtttagacggttttaattaggtaagttttgaaaaggattgggttttttttgagaatagagatttatagtgtgagagggatttagcgtgaggggttttttttattttgggttttgaaaatggagggattatggggaaagaatattggtggttaataggaattagaagttttttttattgtttattttgatagttcgaaggaaatagggattttaattttataattgttagaaatcgaattttgttaataaattttatataagtttgggggagaattttaattttaagatgaggatataattttgcgaaattttgaataaagagtttattacgttaggtttggatttttgatgaaggaaatgtagataaataaatgggtgttgtttttagttattaagtttgtggtaattggttatgtattgttaggaaataaataaatagatttaaaggataagtatatgatattttttttatcggaatgaatttatgaattgatatgtatagtagttgtataaaattaaatattttttaatttgttttgtattttttattttatgatttttgtgtgatataattttgaatataattatattttatttatttatttaataaaaattaatttagtgtttattatgtggtagatatatttttatattttgtagatataattttgattaaaataatttaaagtttttgtgtttgtgttttttattttagaggttttttgagagtaagatggagttattagaggtttttaagtgaagaaatgaaataatttgatttatattagtaggattgttgatttttgtggggagaatagttatgggtagtaggtaagggatagagttagggttagggatagagttagggttataatttagtagtgatagagtagtagagattaaggggagaggagggtttgaaggatgataggaatagagagaagggttggagaagtaggaggtgaggtaaaggaatagaaagaattttaaagtaatggaatttttagatttaaatatagtgttttatagatttttaatgtatttattcgtaaagtttggtatagtgttatttgtattttggtttttaatgtattttgtggggttgtttaaaatttaattgtttttttaagataaaaaggttaaaaaaggtcgggtacggtggtttacgtttgtaattttagtattttgggaggtcgaggcgcgtggattataaggttaggagatcgagattattttggttaatatggtgaaatttcgtttttaataaaaaattataaaaaaaattagtcgggcgtggtggcggtcgtttgtagttttagttatttgggaggttgaggtaggagaacggcgtgaattcgggaggcgatgtttgtagtgagcgagattgtattattttagtttgggcgatagagcgagatttcgttttaaaaaaaaaaaaaaaggttaaaaaagaatattaaatgttttaataaaatatatatatagtttagatgtgaataatttataataataggtaagtgtatgggtcggttattatagtttatgtttgtaatattagtattttgggaggttgaggcgggaggattgtttgagtttaggagtttaagattagttagagtaatttagggagattttatttttataaatattatttttagaaaaattagttaggagtggtggtataagtttgtggtgttagttatttgggaggttgagggaggagtattgattatatgagttaaggaggtagaggttttagtgagttatgagcgtgttattgtattttagttagggtaatagagtgacgttttgtttgtaaataaataaaaaataaaaaaattaataataaagggagtgtatgagtattggcgaagggtattttggttgtattaagtatttgtaattttgaggtaattaaattttgtataggtttttggttgtaatatacggtaatatattgtgttttgtattgagatgttttggattcgtatatataaatttagagttatgaaataaagatattgtaaaaatataatagattagagttatagatatatagtttaggaaagtaaaattttattttgtgagtttaattgtaatgcgtttagatatatttatatatagtggggttaaaaattattttttttataaattagattcgtgattatttaggggttattaagattgtgttatttattgtagtataatcggagatttatttcgaggttgcgagattcgtggagattttcgatataagaattttaggtgtttatattcgattttatttttagtttaggtttaaattttcgggggattgatcggggtagaggaggagtttagtggttgaggtttagtggttgaggttgatcgcgggtttggggatagggttttttatttttagtggatatatagttgcgatttggattcggatcggagttttttcgcgcggggatgaatatattttacgatggcgttagttatttcgttttaaattaggaattgtttttttggatcgtagcggataaggcggtttagatgttttggaggaggaatatgtagagttgtttaaaatttatttgttcggaaggtgggcggagtggtttagtaaaggttttaagaatgaggagagtttgtaatgcgtaggtattagaggttacggggcgtttttttgattttttgtagatatttttgagttattttttaaaagaagggaggaaaatgggattaacgttaaaatattttttttttttttgttttgaggtagaagagtttttttgggtttttaaattttatattagagagtgattgagggttcgttttgtattttgggataattaacggatgaagtttttgcgggaaaggaggggaagataatttttggaatattgatacgcggttttttttgattttttagtagttttgggtattaggaattttttttttaggttttgttttttgttttatatttaatgcgtgtgggggtttgattttagtttttttgagtttttcggtttttatttaggttaggattagaaatttttgttttcgttttagatattagaattttttaaggaataagagattattttaggtgtttgtgtttagaatgttgtttgggttttgtgtttttttttttattttaggtgtttcgtttatttttaggatggttatatgggtgttgtgttttatgaggaatgtaaagtgtttgaattttttattttttgtttttagattttttgaaggtataggtaatttattattttatttttaattatgaggttacgttgaggtgttgggttttgggtttttattttttggagattatattgatttaggagcgggatggggaggattaaatttaggatgtagagtttgtggagattagatttgtagggtatagaattttttagaagtgggtagttgtagtggtgttttttggagagaagtagaggtatatatgttatgtgtagtatgaggggttgtttgagttttttatattaagatggggtaaggagacgaatgagaggttatgtttttttttaggtaaagtagaagtttttttggagtttttaagtagggttagggttgaggtttgggggttagggttttttacgtttatttttttttttagagttgtttttttagtttattattttcgttgtgggtattattgttggtttggtttttttcgttgttgtatttattgtagttgtggtcgttgttgtgatgtggaggaataagattttaggtaggaaaggggtgagttttgagttttttttttttattggtggattttaagttttaggtaggagttggtttatattttgtttagttgtgaggtattatttttatatatatttattttgtttagaggttttgtttattaatatttatttttttgtaaagtatttgtgaaaatgaaggataaatttattattttgattgtggttatgggaatttgatttttagtagttataggttaggggaaggtttttgttgaggatagattttaggaggataattggtttagttttaatatattttttttttttgggttttttgattttgatttgggtttgtagttatagttttggaaatttttttaggattttatgttttgttttttttttggttttttatagtttgttttttttttatagatggaaaaggaggtagttatgtttaggttttatgtaagtgtggtaggggtgggaagagtgatttttgagatttttgggatagtgtagataggagtttatgggggagtttagttattttaaaattttttttttagttatattatttgtgggttttgattagattttgtttttgttttattttaaataggaatagtatttagggttttgatgtgttttttacggtttgtaaaagtgatattttagagggtttgaagtgaaagaggagttgggtagaggggatataattaagttttggagattttttgatttggaattttttaaggtgtggtgggttgtttagtgttataatttattgtgattgatttggattagtttatgattatgttttttttaagattgttttgtgagggattgagatgtaagatttgtttatgttttttttttgtgatattaagggtttttggtttttttttttgttaaagtatttgaatgtgtttatgtttatagtaataggtaagaaatgggagattagtttatttttatgtttattatgatttttgatattgtttggatttgtgtttttatataaattttatgtttaattgtaatttttaattttggaggtggtgtttggtggtaggtgatcggtttatgaggatggattttttatgaacggtttagaattatttttttggtgttatttttgtgataatttttataagatttggtgtttaaaaatttgtgttatttttttgtttttttttttttttgttttaggtatgtaagtaatgtttgtttttttttagttttttagtataatcgaaagttttttgaggtttttttataagatgagtagatgttagaattatattttttgtatagtttgtagaattatgatttaatttaaattttttttttgtttttgttttgtttttgttttttgaaggaaaatttatattattttaattatttttatatatagaaaatttaatagtatatattttatttaatttagtggtatgttttttattttttgtttttttgagtttggtaatgtaaattatatatttgagatttaggatattgtttttttagtgacggcggattttattatatttgttattgtaattggttttgagaatttttattagtttagttaaagtatttttgtttttcgagttaatttgtgtgaaggtgatagtggtgtaggtttttttatggattagatgttttagttttgttttttttttgataatgtagtaagggattttattttatgatataggataggtaagaagataattagtttgatgggatttatattatgtgtaattattattagttgagtttttttgttttttattaaggtggtgatggtgttaatttttgttcgaaggataggtggatttttagtggggaatgttttttttgttagtagttttttttttggtttaggttaatagtttttgtttttttttttggtttgtttttggtttgtattgtgggttagtttaagtagtagagtagttgtttggttgtttggtgtttgggtgaattggttaattttaggaggtatttttagttatttatagaggatggttttttgttgttgtaatttgatatagtagggttattttataaagtgggtgaggtgttttttgggttggatattttgtttagtgttaagatttttaggtttttttttaaataagggatttattatttttttggttttttgtttttttacgatagtaggggttggagttatttttttttttttggttttttttttttttggtattttggatggtgggaggagaaagaaagaaatttattttgtttataaattatttagttttaggtatttttttataaaagtgtgagaatgaattaatttagaaaatcggtatcgggagttgggtattattataaaaattgttgaaaatgtggaaacggttttggaattgggtaataggtagaggttggaagagtttggagagtttagaagataagaaaatgggggaaaatttgtaattttttagagatttgttaagttgttgtgattaaaatgttgatagtgatatggataatggagtttaggttgataaggttttatatggagatgaggaatttattgggatttagaggaaaggttatttttgttatgtattggtaaagaatttggaggtattgttttttttttttagggatttgtagaattttgaatttgagagtgatgtataagggtatttggtggaagaaatttttaagtagtatagtattttagatttggtttgtttgtttgtaatagtttatgtatatatgtgtgagtaaagatatgatttgaaattggaattgatatttaaaggggaaatttaatatttaggataatttttagtggagttgtaggaataggatttttgttaaaattattaaattatagagttattggtaatatgtaagtttagtttggaaaagttataagtatttaatgtttatttatgagagtagttatatggattatgtttattaaagttacggatatgaggttgaagatggtattgtgagtttattgtttgtagtagttagtgtgtttagggtttaagatatagagttaaaggagattattttagagttttaagttttaatgtttgttatgatgagttttaattttgtgaggatattgtatttattttttttggtttatttattttttttggaatggaaatgtataggaaatgtttttattattgttgtattaatattttagaagtaaataattttttttaattttataggtgtatagttataagaatttattttgagttttagatgagattttggaatttagagttgatgttggattaatttaatatattttggataattgggagaagattattgttttttgtaatgtgagaagaatgtgagttttggttggttagggataggatgtaatgatataaatatttatttttagatattttatgttaaaatttgatttttaatgttggatttagggtttaatgggtggcgtttgggttttgggggttaattttttatgaatagagagatattgttttttttcgggagttaatgaattgttgttttattagtttttaaaagagttagttgttaaaagagtttcgtatttttttattttttttgttttttttttattacgtgatttttgtatatattagtttttttttgttttttgttatgagtggaagtagtttgaggttttcgttaaatgtttaaatatttttagatattagaattttgagttaaatgaattttgtttatataaattagttagttttagatatttttttatagtaatataaaacggaataagataatttttttattataggtatgtgtttgtggtagttagtttttatttttaaggtatttaggatttatttagttaagagttttttttttagtattttaaagatattttaattatttaagagattttaaggtttttaggagaaattagggataagattaaatgtttttgtgataatttatattatttttttttttttgattatatattttttatacgaaaaggattataatagtaaagaagtattggtatattatttaagttttattcggttatttaaaattaggttagtttattatttttttgtatgaatatgttttttagaatgatattatttagttttgtagatattatttaattttaataggttttaaaaataagaatggttttagggatatatagttttatttttttaggtatttagtatagttgatttaagagataatattttttgtttatattatttttgaggagataagttaatattgaattttttttattatataattttttgatttatttatttatttttagttattatttttttttttgtttttttatattagttttttttagttttagaagtgatattaggtttggttgttgtgttggtttagattgtatgtagtaatagtattttattatgtttttttttaatttatttttgattatagacggtaggttatataggttaggaattagtgtaggttatttgattattagtttacgtagttttatttatagttaatttcgattttgttagatgaaatgaaggtatagcgtaatttttgatttgtttgggaatttttatataaaggtataaaaatatagttatggttttttttttagggataatttttgtttttggtagttcgatttgtatttttgtttttggtattattgtattttgtgtaaaaaaagaaataagaaatgaagtgtagttattattttagtattttttttttaagaagaattgtatgtatagttataatagtattattttgatttattaggaaaaagagaggaagttatttagtggagttagtttcgtagttttatttatgttgatagtaagtatatttatgaagatataaaagttagttttttatgtttatattgtttaataattatattggtagtttttagataattagataattaatgttttaattgattatttttttttttttttttttttgagatggagttttattttgtcgtttaggttggagtgtagtagtatgatttcggtttatgtaatttttgttttttaggtttaagtaattttattgttttaattttttaagtagttggtaatataggcgtttattattatacgtagttaatttttgtatttttagtagagacggggttttattatattggttaggatagttttaaatttttaaatttaggtgattcgttcgtttcggttatttaaagtgttgggattataggtatgagttatcgcgtttggttagttattttaatattttattaaagttttttttgaatagtatatttttttgtgtattgttggttttttaaggttgtaaagtgtgtttttttgtgtaaagaaatgtgatttaatagtttaaattggtgtaatttttatttttttggtttttgtatagtttttgaagtattgatatttatttttggttgaatatagtttaatttagagttagtgatttttttgttaagatttattggtagtttttttggggttgttggtattagtttggtttgttagttatgaatgattaaagttttttattatagaatttgttatagagttgtttttgtttgtttttttgattaaaagttaaaatagatagtacgagaaatgagataaattattaaaattgtgaatataagagagagtattattaatgattttttagaagttaaaaattattataagttaatattttgaaaaatttgaagttaattagttagattatttagataaaatggatagatttatataaagatagaaattgttgaaattgatttaaaaatagatagaaaatttgaagagaattgtatattaagatagtaattttaaaatttttttataaagaaatgttaaagtttagatatttttattggtgaattttattaaatattttaaaagtttttttagataagaagagaggaggtaagattttttagtttatttatagaattgatattattttaatattaaagttagagtaagattgataagaaaagaatattatagattagtgttattaataaatataaatgaaaatatttttaataaatattggtagataatagaaagttacgtaaaaaaggattatattttatgattaatgggatttattttaggaatatatggttggattaataattagaaattaattaatggaatgtattgtagtaagggaataaaagatataattattttaaaagatatagaagaaatagttgataaaaatgttaatattatttatgtttataagttttaataaaataggaatggaggggattttttttattttgataaagggtatttataaaaaatttataattaaaattatgtttgttgaagaaagattgaatgttttttttttaagatggagattaatgtaaggatgtttaatttaatatttttatttaatattgtattggagattgtagttggtgtaataaggtaaataattaaaagttaaaggtatttagataaaaaggaaaatataaaattttatttatagataatatgattttgtttgtagaatttataagtagataaaagtttgttagtattaaaaaatgaatttagaagtttttataggatataaatttaaattaaaaattattaatatatttttttatataagtaattaaaatttaaatttttttattatagtagttataaaaagagagaaataggaataaatttaggaagatagtagagtttgtttgttgaaaattataaaatattattgagagaaattaaaggtttaaatttatggatagatgcggttggaaagtttaataatattgttaagatggtaattttttattaagagatttataggttttgtataatttttattaaaattttagtaggtattttatggaaaattgataatttaattttaaaaatgtatgtgaaaatgtagaggatgtagaaaagttaacgtaaatttgaaaaaaaatggaatgttatataaaattataataatttagatagtgtgaaagcgagagatatagagattaatgaatagaagtgagaatttagaaagatatttttatatttttttgttaattgatttttaatgaagttgtataggtaatatgatgtgatatttatcgttatataaaatataagtttaaataaattagagatttaaatagttaaaatttgtaagttaaaattataaaatttttaaaagaaaatataggagaaaatttttgtgatattgagtagttaggtaaaagatttttatataaaatataaaaaatatgatttatagatgaaaaaaaagtgagagataaattgggtttagttaaaatttaaaatttaagtattttaaaagataatattgagaaaatgagaagataagtcgtagattgagagaaaatattttataatttattataaattatatttgtgatgaagaatatgtatttagaatatgtgaaaagtttttaaatttaatgtaagaagatgagtaatttaattaaaaatgagtaaaatatgtttaattgatttttataaaagtataaaagtaatttaatgaaggaaggagagtttttttattaaatggtgatggaataattggataattatagtggaaaaaaataatttgagttaaaattttatgttttatataaaaataatttaaaatgagttataagtttttatgtaaagtatagagttaaaatggtaaatattgagttaggtgtggtattataggtttgtatttttagttatttaggaagttgaggtgggaggattttttgagtttaggagtttaaggttagtttaggtaagaattttttttttaaaataaataataaatttaaatttttaaattataagttttttaagaaaaagttattagagttaagattggataaagagtttttagatataatattaaaagtatgatttataaaagttaataaattggattttattaatattaaaaattgttgttttgtgagagatttatgaagagtataaaaagataagttatagaatgagagaagatatttgtaggtaatatattatgtaaagattgtatttagaatatatgaagaaattttaaaaataataaaaatgaaatttaaatataaaataggtaatgagtaagatatgaatagatattttattgaagaggataaatattgggttaataagtagatgaataggtgtttaatattattatttagtaggaaaatataaattaaaattatagtgatgagaatggttgaaatataaaataaaggtagtaatagatgttggtaaggacgtagaggaattgggatatttttatattgttggtagggatgtattttaaaatggtatagttattttggaaatgagtattgtagttttttttaaatcgaatatgtaatttattttatgattagtaattgtttttttaggtatttattttaaataagggaatattttatgtttacgaaaattttgtgtataaatatttttgtagttttatttatgatatttttaaataggaattaatataattgttttttcgtaggtgagtgagatttgttggttgaaattataattgagttatataagtgtttttttttaaggttattattttgtttttttgtgtagtaagggttttatgtatattttttatttttttataaagaatattaaagacgtatatttaaggattaaattttaatttatataaattttttattgttttattaaagatatttttaaatgggattgtagtttggagttattgtttggttttgttgaggtgttgggtgtgttatcgattttggtatttgtagtattaatggaaaagttaatataatgaaataggtagatggtattttggtattattgtgaaaataagtttgtttttaggattttttgaaggttgtttaggggatatatttttaaaatggtaaagattaattatggtttttagtgggatataatttttagtttatttttatttagtattgttttgttttttatttttttttatttttttaatttataattgtataaatttttaaatgtgtaaagaagttgaaagaacggtgtagtaaaatttaagttattattttgtcgtatttggttaatatttttttatatatataaaaggagagtgtgaaatgatggattatggagatttagaagggtaagggggttggtagttggtgtataatagaggggttttttgatgggtataatgtgtttgtttttagtgttggatgttttgaaggttttgattttattataattaatatagtaatgtagtaaaattgtatttgtgttttatgaatatatatgaatttaagaaataaaaaataaaataatataatatgtttttttatagatataggtagatatgtttgtatagtatgtgtgtgaatgtgtgtgtgtgtttgtgtgtgtgttcgtttgtgtgtgtgtgttcgtgtagagaggtagtataaattaagagattaagattttgtgattgagttattttaaagtaatttaaatataaaatatatatggataaatgtgtttgtgataataaatttgaatataaatatgaaataatatgtttataaatatatttttagatagatagtttatgaatgaattttttattttagtttttttattggttgttttgtgaatataaggagttagggaataggatttagttagggttttttattttttttttgtatttaggtaggttttgtatttattttggttgtatagaaggtttttatttttgttttggtttgttttataggtgtttttttaattttttttgttattattgttttatttggatggagttgaggttgttttgattaagaatagtattatttatttgtgtttttaagattaggaagttaggaggaattatataataaggttaggaattattttatttttttaattagtttgaattgatggcgggagatgttgatgtttgttttatttatttttaattttagtttatttattttttattaatttaatttaatttttttagtagttattttattttagaagttgattgatttttatttttcgtaattaggaaattataaagtatttttcgttttttttttgatattattttttagttttatattattatatgtgggttttaattttgtagggaagatgttgttttatagggttagtttttgaatattggttgtaaatgtttttttatttttttttagttttttcggtgttgttgtgaatttgttttttattgagaattggtggggagatgtgggggaggaggggagatttttttatgttgtgttaaagtatggagatagattttttttttttttttgaattttatattatttttttttagatatttgaaataaaacgtagattagaaatgtttatttaagagttaaatatttatagtataaaatatgaagatagagtagaatggggtaatgtaggagagtatgatagagatgataggattttaaggtgttaggaaagttggtgttgggttaggattaaggagttattagtaggatatttatttataaagtttatttataataatataattattgtatatgtaatatattaaaatataataaaataataaaataataaaaataatatggtatagttgtaaatattttatatatattaattttttttatttatttaattataagaaataaatgttcgtagtttttttatgttatagatgaggaaaatgaggtataaagagagaatatgttggtgaggtttaggtaaggagttgaatttagatcgtttggttgtagagtttagttgtttttagtggagttagcgaatttaggagttgatattagagattgagattttagttgtgtattgttttggtggttttttgttttaattaggtgttgatttaggttttgtaggtttacgcgttttggaaaaaagagagaaattaataaatgtttttttgggtgtagagtgttgttttttattttttgaggagttttttttttttagttatttttaaattagatttattttttttttgacggaagatgacgtttttattttttttttttttttatggtatttttttagtttttgttagttttttttcgtgattttattaatattagtatttgttttgtgtttattatttattgtgtagtgagtgaaaggatttaggattaaggaataagatttaagaggaaatttagtgttttttttttttttttttaagtttgattagttttgatatagtgagaggtttttttaaagagaggttttggttttgtttttatgtttttttaggtttgggttaagttatatatagtttttttttttttgagattttaggttttttttatttgtagaggtatttgtatattagggtaggttttgtatattgtgggttttgttttttattagtagtttattgtttttttttttttagttttgagtagatagtttttaattagagattttattaggaagttttggggtttataggttttgtatggaaatatgtggttgttatggagtttgtatttgatttgatgttggggatttttttgtttaaggaggtttagtttgttttttttataatttgtatttgggttgtgtttgtttttgtttgtttatttaattttggaaatgtagttttattttagggttgttgtttggtgaggttgtaagttttttttgttttatttttaatagggattttatttaggttattgttatcgtagtttataggggatttttttcgtttgtggagtagggggtttttttagattttttattttgaggttgtttttacgtattttttgtatttggggattgttattgttataggtattgttttttatatggattttttgagaaacgaagttttaaatttgattttttgttttatttaatattttttataatattagtgttggaggaaattttattaagattatttagttgaaattatgttgatgtatattaatatttaaagtaggaattttgagaaattaatatgtaatttttatgttttttttttagttaatgttttagtgatttacgagaaaattatttttgtttatagggaattagaattgataatttttttataggagatatcgtaggtgagagtaggagtaattatagatttgtattgttcgcgttgtggttgttttttggacggggtttttttgttgtagggtaggggatgaatcgttttatttgtttaggtttgagtggttaattaattgtgtaattaggtttaaggatgagttattattattttattggttagatatacggaagtggagaaatggtagaaagattcgggttttttggatattttagatttttattgttttttgtattgtttttgtttttgtagaaatttaaaattttttgtttgttttttttttttttttttaaataatttgattgtgggggatatgattttgattgttttttattttaaatttattaggtagtgattatattaagaataaaaaaattggtttaggaaaggtaaggtgaggttatagagtatagaataaagtttaaaaaatagtttattgggtattatgattttcgggggttggaaaaagtaatatttggatatgggatgaaaatagggattatagttgttttgatagagggttggtttttattttttaaatagtttagggatatttgtttattaattggtttatattatttgtaaggaaatatagggagataggggttatatggtgggaatttagaaaaagtacggtttcgagggatttagaggacgtgatatttttgagatagtttttagatgaggtatatggggagttgtaaagtggatagaggatggttatgtgtatttaggattttttttgttataaggggattttaaaggggttgtatatatgggggtttttattttgggtttcgtgggttttttttttgatgtttttttgatggttggagaaataggggagggggatgtagaaaggaagggattagaggtattatttttttttggatttttttttagtttttagttttttttagattatatttgtttttattatttgttttttttgagatagcgattatttaggtttttagtaattagtacgtaatttttaatttatttatttggatgtaatttggtaagtttgagagatagagatcgggatggggataaagtaggtattacggttttttttgttgtttattttttatttgtagtaggaggaggttatagttggatgttcgagggttttggtttagttttggtttgggtaggatttaagggtgtaaaaaataatttatatgtgatggtttatttttaattttatgtgttttagtataggtttaagtaggttatatggttataaagagataaagaaggaaaatgtattaagttattattttttttattttttgtttttttttttatgtattggttaggtatttatcggttggggtttttttaacgattttttttttattttattaaaaaatgtagtttaggttaatttgtaatatagataattgtatttttttttattaattaagtgtagttattagggatataagttaaatgtttaaagagttttgagataattataatgtattatgggttgtaataaaatgtagtaaaaaaaaaaaaaattttaaggaatatattagaagttttaaattattaataggtgatattcgggaagatcgtaagtttttggtatttagttaatgagtaattgggggagggagttgagtattagggaataaattgttgaaattttttttggtgtgtttgtattttagatatttaatattgtaaaatcgttattgatatttttatttttgttgttttttgggttttagagtttattttttgggtttggatgggtgcgtttgttttttataatttagttgtttatatggggatttttgtgtttgtgtgaagtgagtgagattttgtttgaaaggagaaatatatattaattgatttatgtggtttattttatttggatgttttggtttttcgtagaagttatagataaatttgaaattgttatttaggatataatgaaagtgatatgggggtacgggagggtggggtggaaagtgggtattatagtaattaggtaattttatgtgttttgtggaaggtattgaaagtattgtgggggttatattattatgagagagttgaaggatgtggggtggtgttggggttgtttatcgtttttacgtaatttagtaaattgtttttgagggagtttgatgaggtttaaagaatgaatgagattattttaggtatggttaagtaggagttataattgtagtttttatgttgtttggatattattggtagagtagattaataaatttttgggtttatagtgtgtagttgtagatttggtgagtgtatttttttttattttaattagaaaggggatatggaatgatttatatttatgtgggatttataatatatttatttattatttgttttagggttattgtaatttttttgttcgttatagtatatagttttaagattatattagatatattggatattttataggatattaaattagtttattttattgataattttatgtttattggggtggatgagtagtaggtagaaagtgtattggagtttttggtaaaataagtatattttagaaggtgaaggtaaattttatagagttttaagagtggttattgaagtgaagttttatgggtgaataagtgttaagtgtttaggggaatgtaggtgtgttttttttaaggtaaaagataaattgttttattttgtatttttattagaaggaaggaagtatattgtttgatgagtttttttgagttttgatgatattatattttatatttaggtgtgttgttttggtttatattttaggtgatataggaggaggttatttttatgtggggtttatataggaaaggattttgtagtagatttaggttatggtataagtagttagtattttttagattttttggggttggtggtgttagtggtggggaaagatgtaggatggagttgaattaagtattagtgggagagttataatggagggtttgggattttggagtaagattatgttatttatagtagagatatatgttttttgttagaagtaatatttagtgttatttgttttgatttgatagaatgtttgattaagagatattaaataataatgtggttttaagtggttgtgtgatttataaagttataaattgtataggtttaatagtatttattaataggtgaaaatggtttatttgggttgagtttgaattttatgttgatatttatagaaaatatttaagtgtgatgtggtattgaataattaaatagataaatggtagttagttagtttttattatgggttagtttaggtttggtaggatgggtgtatgaatggagtaattatagtggtaggtatgaggttatgtatggggttagtagtattgatttttttagttttattaaggtagatttagttattgttatttttgaatgttaattcgttagtatttggagtttatgatgtgttttagtggggtattatttttttcggcgattagttattaagtaataagtgattatatttagttatttttattttggaagggttagaggtttatttttatagaaataggtttatattttatgggtgggtttttttgttttgttttgatatttagttagtattatttttcgggtgttgttgatatttttgatttgtaggttaggcggtgtttttagtttattttttgtttgaaggatttatttggtttggaaagttttaatgtttttatggttgtgggttttattaattttattattatttgtattatttaggagttattagttataaggaatgttggataggttttttataggtataatttagtgttagtttggaggaagtattttgagagtgttattttttagaatatggtatattgtttgaattagagatgtttttatggtgttgtgtttttaatggaagaatatgtgggtttagaaattaaaaggtggaagtaggtatggttttatgtttaattttttagatttatttattaaggtattttgttttttttattttttaataatgggttgtgcgggttaggaggttttggtttttaaaggagggtatttttaaaagtagataaaagagagtttattgaattatatattattttagttattagagaagtttggagagtatgtttttagagattatatcgtgagaagaggagtgtttttttttttaggtttaggtaataggtttttatttttaggaggaggtatggttatttttatataatgagggtagaagtgtgtgtggaaattagatatttatttgggaattttttgggtttttttgttttattgtaagtgtgagtagaattatttagaaatttagtttgagaggatttgatttttaagaatttagatttatttgggtagtaggtttgagttatatttttgggtaattttttaaggttttgtttttgtgttttgatatttttagtagtattggtatggaggttttgttttttatgggttgtttttagttagtgatggtttatattagtgatattaaggtaggatatttttgggagataggggatttttttgatggttaatggtggtttcgggttttttttatggttttgtttaattttttttagattgtttgtggtttaggaaatatttagtaaattttttttttttttgtttattattgggggttatatttgtatttcggtttgttgttttttttagggtaatttgatttttttataatatcgtttgataggtatgttttttaataaaatgttgtaattttaattttatgatggtatttgttttttggaggatttggattataaaattatttttatttgtatattagtgtttttttattttaatttgtaaaatttttttgtttatttaattttttttatttgcgttggttttattttgttggtatttgtattatgtttttgagttcgttaatgtttgttgatttaattattaaatttgggggtagtttgttatgcggtaatggataattaatgaagtttttttatatttttattattttatataggttacgtatatttgttttatttttttttatttttataatattggttatacgtagggtttttagttttttaacgtgtatttttttttttattttagtttttttttttttttgttttttttttttttttttttttttgttttttttttttttttttttttttttatttttatttaatttttcgtttttttttttttttattttgtttttttttttttttttttttttttttttttttttttttttttttttatttttttttttttttttttttttttttttttttttttttatttttttttttttattatgaaaattttttaatatataaaataattttatgtgattgtgttataagtaagtattttttgaatttgtatgttaaaagtataatgttacggtatatgagaaataagtaaataatagaaagttattgatagaatttaaataaaaatgtttgttataattttgtagttaagatagtggtttttaatttaatttttttaatttagtgtttttagaatatattattaatattaagtattacgtatttattttaaaagtttaggttaggcgtggtggtttacgtttgtaattttagtattttggtaggttgaggtgggtggattatttgaggttaggagtttaagattagtttggttaatatggtaaaattttattgtcgtaatcggttattatgggatataatgaagggggatgaatatagaaataaagataaagataaaaagatttgttttaaaagaaggggtcgggggttttttgtttttagtgattttttttggtagtaaatttagtttgttagtttgttaatattttgtttttatgagaatagtttgttgtttgtttatatagtttttagtggtatattgagttgattacgatttttattttttcggtttttaatatttcgattttattaaaaatataaaaattagttgggcgtggtggtgtatgtttgtaattttaattattcgggaggttgaggtaggagaattgtttgaattgggaggtggaagttgtaattagttaagatagtattattgtagtttagtttgggtaatagagtaagatttcgttttaaaaataaataaataaataaataaataaataaataaataagtttaagttggtataattattttggaaattatattattattatttagtatggttaaaggttatataatatattatttaattattttatttttaattatatattttgcgggtttttttgtttatgtgtttaggagatatgtatattaatgtttatggtaagaattggaattagttatatatatattaatagaaaattagtgtaattatggtataattataaaatgtaaatttttagtagtaaaaacgaatgaatgatagttttttatattatagataatttttatatgtaatgtgtattatgggaaaataaatgtagtaggaatttgttgtattggaagtttaaaaattattaaaattaattaatatttggattggggatatatttatatttattatataaatttttaaagaaattttataatttttttatagatattatgaaaatagtaaggtattggtataaaaataggtatatagattaatggaatagaatagagaatttagaaataagattatatatttaaataaaggaataataattataagatttagggtggagtttttttttgggggatgtgaatgggtagtagtttagggtagtttataggttttgtgttttataatagtgttggttaaagtttaaataatatattatttatttttttttaaaatggaatttttaaaataaatgtgtaatatttgatgttgatgatgtgttttgaaaatattgagttgaaagaattgatttaaatttttaattttttaaatagatttttttaaagtaaaatatgtttggtttttataaaaatgaaagagaaaagaatattaaagtttattgtaagtatttttaataagaattatttatattggaataaaattatatagaattgtaaggagttatgtgatagagaggattacgaggttatgaaaatggttttggttataaataggttatttgatttttggtttattggtatttttgtagatttttatgtatataatttttaatttgatgtgtaaggtaattttattttgtaaaggatttgatgttatattttattatatatattattgaattaaatttttatagaattggaaatgtatattattgattaaaataaatgaaataagaaaagagtagaaaggaataattagtgatggaatagtaatatgaatagaaaatataataggattgcgaaaataaagaaataaataaaattattttagaagtatttgatggtatgttatttagaattatagtggtgtttaaattatttttattatatattatttaatattataataaaagatgttaagtgtattatagaatgtcgatcgaatagttagttatcgaaaaaattagttttttaattcgagttaataatttcgtgatattgtattaaatcgaagttattggtatgttagatgtgttgattgaagtatgagatttatatttttgtaaatgaaaagtaatttgattaagtaatatttttttaagtgaaagtaagttaattagagaaagaaataaaggatggttattttagagatagagtagtatttttttttttaagtgtaggtaaatgttttttggaagacgatattttaataagaaaattggtattaggggtatattttttttaaatttgagatattttagataaaataaagatttatttttaaggtattatttttatagtattaaagttttggaattatttgatttagttattttatgtttttaattgtgttaatttattgaagagaatattgttgttattaaagatattggtaagaaaaatttagagatattgttgtattttttttttttgttttaaattgttttttttttaatatttaaggttttgtgatgttttaaatttttagttattaatttaaaaagtgaagtttattatagaattagaaaaaaattattttaaaatttatatggatttaaaaaagagtttttatagttagaagaattttaagtaaaaagaataaagttggaggtatgaggttatttgatttaaaattatattataaggttatagtaattgaaatagtaaggtattggtataaaaataggtatatagattaatggaatagaatagagaatttagaaataagattatatatttaaaattttgtgatttttaatgagtttgataaaaataagtaatgggtaaaggattttttatttaataaatggtgttgggagaattggttagtaatttgtagaaaattgaaattggattttttttttatattttgtttaaaaattaatttaagatggattaaagatttaaatgtaaattttaaaattataaaaattttggaagaaaatttaggtaatattaattaggatatagggatgggtaaagattttatgatgaaaatgttaaaagtaattgttataaaagtaaaaattgataaatgggatttaattaaataaaagagtttttgtagagtgaaagaaattattattagagtgaatagatattttttttagaatgggagaaaatttttgtagtttgtttatttgataaaggttttatatttagaagttataaagaatttaagtaaatttatattaaaaaaaaagttttattaaaaagtggataaaggatttaaatagatattttttaaaagaagatatatatgtggttaataaatataagaaaaaaagttaaatattattgattattagaaaaatgtaaattaatattataatgagatattattttatgttagttagaatggtaattattaaaagttaagaaataatagatgttggtaaggttgtagagaaataggaaggtttttatattgttggtggaaatgtaaattggtttaattattgtggaagatagtgtggtaattttttaaagatttagaattagaaatattatttgatttagtaattttattaaaggttatatatttaaaggaatataaattattttattataaaggtatatgtatgtgtatgtttattgtagtattatttataatagtaaagatatggaattaatttaaatgtttattagtgaggaattggataaagaaaatatggtatatatatattacggaatattatgtaattataaaaaggaatgagattaagttttttgtagagatacgaatgaagttggaagttattatttttagtaaatttatataggaatagaaaattaaatatcgtatgtttttatttataattgggaattgagtaatgagaatatatggaattagggagaggaaaaatatataatggggtttgttcggggagggtagtgatggggggattattaggaaaaatagttaatgaatgttagggttaatatttaggtgatgggttgataggtatagttaattattatggtatatgattatttatgtaataaatttgtatattttgtatatgtattttggaatttaaaattaaattaaattaaattaaattaaaagataagtttaaagtattaaagaaaaataattagataaaagaagtttttgatttataaaattttgaaataatagttttaattttgtttttaatatatacgtaagttttttagtatagtttttttttagaggtgtagtttaatttttttttttaagtgtggtttggatttaatgatgtatttttgatatggtttatttttgtgtttttatttaaattttattttgaattgttatgcgaattttgatttttatatattggcggcgggattttatgggaggtgatcgaattatggggatgatttttttaagttgtggaagttagcggttgaatttattttttttaatgttttttttagtattgtttttttataataggttttagtgtgtgatgtttttttttttgtgtttatgtgtttttattgtttagtttttagttataagtgagaatatgtggtgtttggttttttgtttttgtgttagtttgttgaggataatggtttttagttttatttatatttttgtaaaggatttgattttatttttttttatggttgtataatatttatggtgtatatgtattatataaggggattttttttattttattttgtattttttttttttgttattatgtgaagaatgatacgtttgtttttttttttgttatgattgtaagttttttggggtagtttttttagttatgtataattgcgagttaattaaattttttgtttttataaattatttagttttaggtatttttttatagtagtgtgagaatagattaatataatttttaattgatagagtaatgttgatataatagtttgtgattttgggtgtagaatgtgaaatttattatggtttttattttttttttttttgtttttgggattatgagtttttggggatttagttgttgtgttataagtagttttgtaggaaggtttatgtggttaagaattgaggttttttgggattagatagtaaggaattaggtttttttaatagttatgtgattaagttatgttttatgtgaatttttagttttagtgaagtttttagacgatgtagttttaggttgataattggattgtaattttgtgagaggttttgagttagaagtatttaggaaaatcgtttttggatttttgattattagaaattgtgggagatgatgaatatttgttgttttgagttgttaagttttatataatttgttatataatagtaaataattaatatatttttataagagaggatgtattattatacgttaatttgtatttgttttaaatttattattattatattattatttttgagatagggttttgttttgttatttaggttggagtgtagtggtatgattattatgtattgtagtgtcgattttttgggtttaagggattttttgattttagttttttgagtagttgggattataggtatgaattaatatgtttggttaattttttaatttttttgtagagatgggggttttattatgttgtttaggttgattttgaatttttggagttaaatttgtttttttttgtttttaatagtgttaggattgtaggcgtgagttattatatttggtttaaattaattataagatattaaatatgtaatttagttttaaaaggaaaggagaagttttacggttgaagaggatgtattttattattatttataatgattattttatttgaattttagtttttaattgtgtttaaattaaatataaaaggaagatttagttttttttgggttgattttattatggtttttaataattagtttttggttatttatttttttttagttatttaattaattttaatgtaggtgttgttgtgaagggatttagtagatataattaagggttttaattagttgattttaggttgagtttattttgtttggattgttttaataaggagagtttttgaaaggattgggttttttttgagtatagagatttatagtgtgagagggatttagtatgaggggttttttttattgtgggttttgaaaatgaaggggttgtgtaggaaagaacgttggtgggtattatgtattaagtgtagttttttttgttttttatagtgatagttagtgaggaatagggattttagttttataattgttagaaattgtattttgttatttttgtataagtttgaaggaggatttaaaatgaaaatataggtttaggaagatcggaatagagattttatttatattatgtttagatttttgattaagaaattataaataataaatgggtgttatttggttaggcgtggtagtgtatatttgtattttaatatttgaggagttgatataggaggaatatttgtagttaggattttgagattagttaggataatatagtgagatattcgtttttatatttttttttaattagttgggtatggtggtatttgtttgtagttttagttattttgaagattgaggtaggagggttttttgagtttaggaatttgaggttgtagtgagttatgattatgtgattgtattttattttggatgatagagggagattttgtatttaaaaataaattaatgaatataataaatgggtgttgtttaaagttaatgtttgtgataatttgttatttagttttataaaatttatatatagatttaaaagatttttggaatgaattgatgaattgatacgtatattagttatataaaataaaattttttttaatttttttagtgttttatattttataattttttgtgatgtaatttaatatatttataatttatttatttagttaagaaaaaataatttagtttttataatgaattaggtatgtttttatatgtttaagtgtttgatattttagaagttttataagaatgaggtggagttattggagtgttttaggtggagaaatgatatattttgatttatagtagtaggattattatagagagaatatttatgtagtaggttatggaatagtgttagagttataatttaggagtgagagggtggtggggattaaggggagaagagggtttgagggatgagagggacggagggaagggttggaggagtaggaggtgaggaaaaggagtagaggaaagaattttaaagtagcggaatttttaggtttaaatatattgttttatagattttattatatttatttatagagtttcgttgggtgttttttgtagttggtttttaatattttatgtgggtttgtttagaaattaattgttttttatgttaattaggtttaaaaaatattaagtatttttaaaaaatatatattttatttatatgtggatattttttaaaaataggtagtgtatgagtattagtgaggggtattgtgattgtattgaatatttataattgtgaggtgaataaagtttgtgttggtttttggttgtaatatatagtaatatagtgtggtattttgttttgaggagatgttttggatttatacggaaatttagggttacggaatgaaggtaaatttaaaataaaataagcgggagttatagatatattgtttgggaaagtgaaatttaagagttttgtgagttttgttgtaaggtttttagatgtatttatatattaacgggttaaagttatattttttatttattagatttttgattatttaggggttattaagattatgttatttattatagttaataaataaaaagtaaattggtttttattttattttatgtatttaggtataatttttttagatttaagggggaaaaaaaattttgtttttatatttataattttagggcgagtttattttttggtattaagtttcgtggggtgattttttttttagaagagtataggaggataggtaaggagtgggaggtagggagtttagtttagggatagggatttcgggatgaaaagtgaagggagagggatagggattttgtcgagggtttttttttggttttttagatagtttttgggttaagatttagggagatattgagatagaacgtttggtataagagtagcggggttagggcgaagttttagggttttaagcgtggtttttagggttttaggttttataggcggtgtatggattggggaggtttcgcgttggggattttttttttttttttttaatttgtgtcgggtttttttttttggatatttatcgggcggttttagtttttatttttattaggtgataggtttttagagaagttaattagcgtcgtcgcggttttggttttaaagttttcgtttatttattcggatttattttttttagacgttaaggatggtggttatggtatttcgaattttttttttgttattttcgggggttttgattttgatcgagatttgggcgggtgagtgcggggttaggagggaaacggtttttgcgcggaggagggaggggtcggttcggcgggggcgtaggattcggtagtcgcgtcgggaggagggtcgggcgggttttaattttttttcgtttttaggtttttattttatgaggtattttagcgtcgtcgtgtttcggttcggtcgcggggagtttcgttttatcgttatgggttacgtggacgatacgtagttcgtgcggttcgatagcgattcggcgtgttcgaggatggagtcgcgggcgtcgtgggtggagtaggaggggttagagtattgggaagaggagatacggaatattaaggtttacgtatagattgatagaatgaatttgtagattttgcgcggttattataattagagcgaggttagtgagtaatttcggtttagggcgtagattacgattttttatttttatgttttacggacgtttcgggtattttcgagttttcgggtttgggatttatttcgaggtcgcgggattcgtttagattttttatttgggagaattttaggcgtttttattaaaatttttgcgggtgggttcgggcgagggcgaggttcggtgggcggggttgatcgaaggggtggggttaggtttttatattttttagtggatgattggttgcgatttggggttcgacggacgtttttttcgcgggtatgaatagtatgtttacgatggtaaggattatttcgttttgaacgaggatttgcgtttttggatcgtagcggatattgcggtttagatttttaagcgtaagtgtgaggcggttaatgtggttgaataaaggagagtttatttggagggtacgtgcgtggagtggttttatagatatttggagaacgggaaggagatgttgtagcgcgcgggtattaggggtagtggggcgtttttttgattttttgtagattttttagtttggtttagtataaggagaggaggaaaatgggattaatattagaatatcgttttttttttggttttgagggagaggaatttttttgggtttttagattttgtattagagagtgattttgagggttcgttttgttttttgggataattaagggatgaagtttttgagggagtggaggggaagataatttttggaggattgattaggggttttttttgattttatagtagttttggtattaggatttttttttttaggttttgttttttgttttatatttaatgtgtgtgggagtttgattttagtttttttgagttttttggtttttatttaggttagaattagaggtttttgttttttcgtttagagattagaattttttaaggaataggagattattttaggtgttcgtgtttaggttggtgtttgggttttgtgtttttttttttattttaggtatttggtttatttttaggatggttatatttaggtgttgttggagtgttttatgagagatgtaaagtgtttgagttttttgatttttttttttagatttttttaagatatacgtgatttattattttgtttttgattatgaggttattttgaggtgttgggttttgggtttttattttgcggagattatattgatttggtagcgggatggggaggattagatttaggacgtggagttcgtggagattaggtttgtaggggatggaattttttagaagtgggtagttgtggtggtgttttttggagaggagtagagatatacgtgttatgtgtagtatgaggggttgtcggagttttttatgttgagatggagtaaggagggagatggaggtattatgtttgttagggaaagtaggagtttttttgaagatttttaatagggtcggtggtgaggtttgggggttagagatttttatttttatttttttttttagagtagttttttttgtttattatttttattatgggtatcgttgttggtttggttgtttttgtagttgtagttattggagttgcggtcgttgttgtgttgtggaggaagaagagtttaggtaaggaaggggtgataagtggggtttgagtttttttgttttattgggggttttaagttttaggtagaagtgcgttttgtttggttattgggaagtattatttatatttatgggtttatttagtttgggttttgtgtgttagtatttttttttttgtaaagtatttgtgataatgaaggatagatttattattttgatgattgtagtgatggggatttgattttagtaattataggttaggggaaggtttttggttaaggatagattttaggagggtagttggtcgaggatttatatttgttttttttgttttttttgatttcgttttgagtttgtagttatatatttttggaaatttttcgagggtttaagattaggaggtttttttaggattttatggttttgttatttttttggttttttataggacgttttttttttatagattgaaaaggagggagttatttttaggttgtaagtaagtatgaaggaggttgatttttgagatttttgggattttgtgtttgggagtttatgggggagtttatttattttataattttttttttggttatattttttgtggtttttgattaggtgttgtttttgttttattttaggtagtgatagtgtttagggttttaatgtgttttttacggtttgtaaatgtgatatttcggggggtttgatgtgtgtgggttgttgagggaaatagtggatatagttgtgttatgaggtttttttgatttgaatgtattgagtatgtgatgggttgtttaaagtgttattttttattgtgattgatatgaatttgtttatgaatatttttttgtagtgtgaaatagttgttttgtgtgggattgagtggtaagatttgtttatgttttttttttgtgattttaagaattttgatttttttttttgtagagattagtttatttttgtgtttattatgatttttttttttatgttgaattgtattttttttttaattattttttttgttttagaaaaggggttgggatgttttcgtttttgttttaaatttgtggtgtattgagttataatttatttttgtattaaaattagaatttgagtataaatttagttttttaaattatttttaagagagattgatgggttaattaaaggagaagatttttgaaatttgagagataaaataaatggaagatatgagaattttttatagtatacgtgttttttgtgttgatttgttgtaggagaggagagtagatggggttgcgtttagtgggtgtttaggttattatgaattttatgtggttattgtttagttgggttatttttgttgttttattgtttttggttttttagtagaattttgttttattaggatttgtgattatatagatttggatattatttagggtggtttttatatttagaagtttttgtgttattagaagaaaaatttttagatttttatatttttttttttttttttaggttttttttaattgtattttttatttttttttttttttttttttttttttttttttttgagatggagttttatttaggttggagtgtagtggtgtaatttcgatttattgtaatttttatttttcgggtttaagtaatttttttgttttagtttttttagtaattgggagtataggtatatgttacgatatttagttaattttttgtatttttagtaaagacgggattttattatgttagttaggatggttttgattttttgattttgtgatttgttcgtttttgttttttaaagtgttgggattataggtgtaagttattatgtttggtttttttaatttttttaaaggaagtagattttgaaatttttcgagaggagaggttttagagttttttattgtagtttattttttgttggaattttttttttgtttttttttttatttttttttttgttttgagttgtagtaattttattgttggttttaaattaaatttatggatttgtaaagtagagtttaatttagatttatatgtggttggataattggagttataagttttgggttatttttttttaagagataaatatggttgtgtgttgtagtgtgtaggaggattggtgtgggaggagggagggagggaggatataaaagtagttttggtgagaaaagtattggtgtatttatatttatatgagataatattgttttatagcggttataaaatgatatttggtttgagtttatattaataaagatattgtttttagaataggggggcgtattatagtaattatttatttaagtggtatttgttgtttgttaggtatttgattgtttttgtatttagaaaatatcgttaaagtaaaaatagaaaaatttttggttttgtcgtgtatatattttagatgtaagtttgtttaatttgtagttttcgggatgtatgtggtttaggatagttttagaatgtgacgatttttttgtttatttgtagtggtagatattatgaaaattatttatgtatttttttttttttttttatttttttttgtttattagttgttattagtgtattttttgtgtggtttaagataatttttttttttatgtgatttagggaagttaaaagattggatatttttgtaggtagatgatatagtataagtagagtaggaatagaaaatgtttgagttagaaggtggtaagtgttgtgtggtaggtgatttagagggtgggttgtgggtatagggaggtggttgttgtgttgggtggttagtatgggttttgttgtaaatgtgattttggagtaaagatttgagggatgtgaggagttgtttatacggatgttttagaaagttttttttaggtagggaaatttttagtgtagatgtattagggtaggaaattgtttgtgtttttggaaggaggaagaggttagaagtgttgaatagagagaaattgaaatgaagttagaggtgtgtttagagtaggttgttttggagggtgtgggaaggatgttgatttttgttttgaatgatatggggagttagaggatagttttggaaagtgggatatggtaggatttattttttgaaagtttttttttggttgttgtgttgagaatagaattgagaggtgggggattagtgaggtagtgggaaaaacggtgggaaaggagtgtagtattttaggatggagacgtcgtttattttgattggggtgtgagtaggggaaatagtgggaagtgatgggattttggatgaatttatagtatttgttaatggatttatttgtggtgtgagaaagaagaattaaggatatttatagtattggattgagtgagtagaagggtggagttgttgttagtggagatggggagattttggtaggagtatatagaggagagggtattgtaggtatttagtggaggtgatatttacgaggaatgaaggtgaggggtttagatgtttttgtagttatagatttattatttaattattattttatttttattatttttgtgttttagagttagagtattgatttttttttgtgttgtttgtataggtaggtgaaagttagggaagttatggtttgttgttggttataataagttatagattattgtgtttttttagataattaaagaaataataagagaatttgtaattagaatatttattgagaagattataataatgtaaagttttttatttatttaaagaaggtaatagaagaaaaatagttgagtaagaaagataatattagaaggtagtaaatgaaaatggatagatttaaatttaatgaggttaataatgatattaaacgtaatggatttagatattttaattataagataaatagtgtagagggataaaaataaataagtaaataaataaataatcgtaggttatttataaaagttataattttagtagaaggtatagaaaagttgaaagtaaaaagatagaaaagaaatattagataaatatttatgaaagattatatggagatgttatttagaaaaattatagtatatgagttttttgagatatagagtatatgtagatagtttatagtgtttttttttttttttttagagatagggtttgttgtttaggttgaaatgtaatggtgatattagattttattgtaattttaaatttttgggttgaagtaatttttttgttttagttttttgagtagttaggacgagaagtttgtgtcgttatatttggttataatgttttatttttttatttgttgtggtgtgaataaggaaataatattatattatgtatttgatttgtagtaggtatataataaatgttaggtgaatgaagaaataaaattatttagtaatttaagttatatttatatttatattttataggtgaggagtaatattttagataagtaaagtaaaataaattgatttatattatttagagtagaatcgagaatatattttttgtgttaaaggaattagaattttattaggggttatagtagatattatgtaagttatatatgttaattattagaattggagttgatatattttgagatatattaaattaagggtttggaaggattaattgaatgtagaaataaaggaagaaaatagatttgtttaaaagatggttagaatttttaaagaaataatatttttttaaagtggttttatgtggattaaagtagagatgagtttaaatgttaggtgggaaaatgtttgattaaatgtagttttagatttaagggagatttaaaaattttgggatattttcggttgttacgtggggattggtgggagggggtgagtggggtgttgttggtaaattttttataatgtataggatagattataagggattttttgttttaaatttttaatagggttgttgttgagaaattcgttcgagaggtaagtgttgtaatgtttttattattttatagattaagaaattgaggtattaggaagaaaagtgttagtaggattagagttgaaggttgaatttaggttatttggttgtagggttttggtttttttggttaagttagggatttaggagtttattataaataattttagttgcgcggtgtttttatggtttgtggcgttttttggtgttgatattgggtttgtggttaaatgaggtttgagggaaaaggaaaacgggtttaggtagcgggattttttttaggttttttagattttaagttatgatttatatttagaaaaaataatgtttattttaattatttttttaattttgttttttttagtttcggttagtattttttttcgattttattaatattagtatttgttagatgtttagtatttattatgtgaggagtgaaaatgttttaggattaaaggataagatgacgttttattttagttatttcgttttttttagagttttagttttgtgtatttagtgtttaggtttttaatttggggttcgcgaatttatttttttatgatattgcgtgtagaagtgatgttatatgtatatatgattttattataggatattggatattaatatttattcgattaattgggggtttaagatattattttttttttaatagtttgtgattttttgaattaaagaaagggtagagattgagggaggttttaattttaaattttttattatttttagggaagtgttgaaaagaagtgtaaggtatttaattcgttttgggaatatagtaggaaagtagagtgtttatggatttcgaattttattaaagaaatataattttggtaaaatatttaagttatttttttaagttttaggtagtagtttaaaataaataatattaaaaataaaataaaatttcggtttaggtgaaattattgaagatataaaattttgtgagatttgtatttagagcgaaggataatttaatttagggttgtagtagaaaatttttatattatattgggtttttttttattatgaagtttttttggagggattttttttttttagtagtgtatagtgaggttatttttgtgtaaaaagatagaatttttttggatttttgatgtttatatttattatttatttttttgattttgtagatgttaattttatatttaatattttttaattattttttttattttgtttaagtagagaatttaaatttgtttttgaagtagaaaattagggattggttatttgagttattattttattttgtggtttttttatgtaataagtataagagattgtgggttaatagaatttgtagtaagataaatataaattttttattttagtttatgtttttgtttgtttggtgatgttttagttttgttttagttttaatattttaaaaagtataattttatttaaattttattttataggaagttatatatatttatttttgttaggttttttagtgaaagtttttttaaaataattgtgaagtaaagatatgtaaataaatttatggtgtttttatgtattcgtgtttattgtattttataaatgtgttagttttattgtaatagatggtgtattaataaatggtgttggaaatttggatatttatatgtaaaagaatgatgttggataaaatttatgtttttttattatattttttttaaaaattaagttagaatgttttaaagaattaattttaagagttaaatttgtaaaatttttaaaagaaaatattgagggaaagttttatggttattagaattggtagtggttttttggttggtgattaaaagtataagtaataaaaggaaaatgataaataagattttattaaaatgtaaaaatttttttgtattaaaggacgttattaagaggtgaaaagaggttaggcgtagtggtttacgtttgtaattttagtattttgggaggttaaagtgggtggattatttgaggttaggagttcgaaattagtttggttaatatggtaaaattttgtttttattaaaaatataaaaattagtcgggcgtagtggtgggtatttgtaattttagttattcgggaggttgaggtaggagaatcgtttgaatttgggaggtagaggttgtaatgagttgagattgtattattgtattttagttggggtattagagagagatttcgttttaaaaaaaaaaaaaaaaaaaaaaaaaaaaaaaaaaaaagtgaaaataaaagaaattgtatagaataagataaaatatttgttaattatatatttgataaagaattaatatttagattatatatagaattataatttaataatagtaaaataattttatttaaaaatgggtaaaagatatgaatagataattttttagagaagatatatagtaaggatataaaaataaggaattttaataaggatatgaaaatatgtttagttttattagtttaggtgttggtgaggatgtggagaaaatggaatgtttgtgtattgttgttgagagtgaataatagtgtagttattatggaaataggatgacgtttttttaagaaggtaaatatagaatttttatatgaagtaataattttatttttgggtgtatattttttaaaaattgaaagtaggtatgtatatagataattgtatagttatgtttatagtagtgttatttttaatagttaaaaggtggacgtaatttaagtgtttattagaggatgattggaaaaataaaatgtggtgtatatatatatggaatattaattagttttaaaagtgaagaatatttggattggatggaattttgaaaatacgttaaataaaataagttaaaaaaaaggtaaatatgatattttatttatatgaggtatttagaataagtaaatttataaaaatagaaagtagaatataggttattaggggttgaaggtaggaataatgggtagttgttatttaatgggtatagtttttgttgggatgatgaaaatgttttgaaaatgtatgttggtgtttgtgtaattattattaattgtaaatgtgtttaatgttaatgaattgtatattgaaaaaaattgttagaaggtaaatcgtatagtatgtgtgttttattataattttaaaaatatatattaatattaaatttaattattttttatttttttgttatttttattttagaattatttttattaggatagaaaatcggaagggttttttagttgggttgtttgttgatttttatgtttattgtttattatttatataatagagagagcgtgtttttttaatgggaattagggtatattttatgaacgttttagttttttttttttttaggtataaggaaattttagttttttattattttttatgtattttttattatagggttttttttggttattttggttttattttattatttttagtttagtttatttttttttatttatattagttttttgtttattttattttgtttttattatttgtttttgttgtgatttttatatgtatgtgttgtttagtgatttatatggtttattttttatattattaaggtttttgtttaaatgttttatggttaagtgtttagaaatgttttgtttagtgattttttttgaaatttattttttgttatttttattatcgttattaattttttaatttaagtatattttttttaatggtaattattagtgatattatgataggttttatttgtttattgtttgttgatttattaaggttattaagaaagaaagaattaatagtataggtatatagatgatagatagataatagatagatagatgatagatgatagatagatgttagatgatgatagatagatagatagatagatagatagatagatagatagatagatagatagataggtgatttattgggttaattggtttatataattatggaggttgagaagttttatgatagattgtttggaagttggagaattagaaaagttagtagcgtggtttagtttaaagttaaagttttgaggatttagaatatagaataggaggataaaggggtttattggtgtaaaagttagagtttaaagattatcgaatttggagttttgatgtttaaggtaggagaagaagggtgttttagttttagttttagagagagagatagagatagagagagatagagagatagagatagagagaaattttatttttatttatttttttgttttatttgggttattaggtgattggattgtggttgtttatagtgagagagtattttttttattagtttatttatttatattttttttagaaaaatttttatagatattggtttaatatttataatttgagtagtttataatttatttttttgagattgggtttgttggttggagtgtagtgttgtttatggtttattgtagtttgaattttttaggtttaagtaatttttttattttagatatttaagtagttgggattataggtatgtgttattaagttcggttaatttttttgaattttttgtagagatagggtttttttatgttgtttaggttggttataaatttaggggtttaagtaatttgttagtttgagttttttaaagtgttggaagtataggtatgagttattatgtttattttgagtgttttatgaatttttaaaattataattatagaagaatttttatgtataaatatgtttgttaaaatattttttattaaaagataagatgaaagtatatggatttaaaagaattttggtgatttttttttgtttgagatgggatgtagtttttagaagtgtgtaaattttatgtagattttatgatatggaaaattatttttataataatatatttaaaaagtaattttaaaataatttataattattttgggaggttaaggtgggtggattatttgaggttaggtgtttaaaattagtttggttaataagtgtaattttatttatattaaaaatataaaattagttaggcgtggtagtgtatatttgtaattttagttattcgaggggttgaggtagaagatttatttgtattcgagatgtagaggttgtagtgagtcgagattatgttattgtattttagtttttgggggatagagtgagattttattttaaaaaaaattttaaaatttatgaatgtaattttttataatgaaagtatatataaaaatatatatatagaaaataaaagaatggaagttagtattattgtagaagatagttttagggatgattatttatattgtagtttaggaagttttaataatatgatagtagtggttttttggaggggaagtttgggtgatattttttttttttttgtatttttttttttttaaaatttaattaggtgttgatgtgtgtattttaaatttttttgtaattaaatatatttttatatttttaatgtagaaatatgtatttttaatatttaaaataaaatatttgaagtaaaataataatgaaaagtggttgaatattgtggtgggtatttgtagttttagttatttaggaggttgagataggagaatggttcgagtttacgaatttgaggttatggttatatttgtgaatagttattgttttttagtttggagaatatagtgagattttatatttaaaataataataataaaaagaagtttagatttttttttaattttaatttaaaataaattttttatttgaagtttatatggtagaaatgtttattgatggtttttttagagagtaaaaaaaatattgtttttttataatttatgatttatttttttgttatagtgtttatttgggtaatgaagttaatattgagaatattattaatttatggaatattgattattttttttatagatatataaattataattatgtatatatatattatattataatatatataattattattatatttgagagagtgagatggattttttttttttatagatgaaaatttgagtttttgagaatttagggttttggtatgggtttattgaaaatgttggttttgagaattaggaaatagttttttgtaggtttgtttggatgtgagttatattaatggagtttttataatagtaggaagagtaattgagaattttggaagttttatatttgtaatgttttatgtttagcggtatttagttgatggatgggttaagataagaatatagtttttttttttaattgggggtggtagaggggtgaattagttagttatatataatgtgtgtggtgtttttatagatatttttaattattttgttgagaattttattttaaatgtataaaaattttgtatttattggtaagtaggattttttttaggaaagtaaaggattttgttgatttaagtaaaatattttttttttaaatgaattattttgattggataattttttatttttattgaaattagttttagagttgtatttgagtatttgggttaaagatagaaagttattttgagggttgggtttggttgattttggataatgttttgaaagagggttttttatttgtagaagaataaaggtttgttttgggtaggagatgatgttttgagaagaaaagatagataggtagatttttaagtaaatttaggagtttattatataaaagattttggaatattttttttagttttttttttattgtggtaaaatatatataaatataaaggatattatcgtaattatttaaagtgtataatgtagtgataatttgtatgtttataatgttatgtaattattattattttttagttttagagtgtttttattattttagggggaattttgtatttattaagtagttattttttatttttatttgttagtagattttgtcgttataaatttatttttttttttatcgatttgttttttatgaatattttataaaaatgggtttataagttacgtagttttttgtgattggttttttttatttgttttgtttttaagatttagtaatgttttagtatatgttagtgttttatttattttatgattaaataatattttattgtaggaaaaaattatatgttgtttttttatttattggtcgatggatatttttttttaaattaaataggaaaaataagagaggaattataaatatatatatgtgtgtgtgtatatatatatgttttgtagggttgagattattttagttagttttttttaatttgtgaatgtcgtgatttttttattatttttgaaggagagttttgtagatatataatttttggttgatagtttttttatttttttagttttaaatttgttattttaacgttttttgaattttatggtttttgatgaaaatttgtatgttaattttattgaggatttattgtatttgaaaagttttttttttgttattgtttttaagatggtttgtttgttattggtgtagattggttgattataacgttttttagtgtggatttttaaaatttttgttgtttaaaatgtattaagtttgttggatgagtaaaattatattttttattaaatttaggagatttgaagttattatttttttaaatagttattttttttttttttttttttttttttgaggatttttaaaatgtatatgtttggtgttgttttatagtttttttaagttttgtttatttttttttataatttttttttatttttgtattttaaattggataattttaattgttttatttttaagtttgtcgattttttattttgtatagtgaaagttgtttttgtaaaaaagtaaatagtaaatttattttagtaaaatatagtaaaaaatagtaaaattattttagtaaattttttattttagttattgtattttttagttttaaaatttttatttggtttttttttaaattttttatttttttattgatgttttttatttgagttaagatagtttttttgattttttttagttttttgtttatagttttttttagttttgtgaatatatttaagtagttaatttaaagttgtttgtttagtaagtatgtttaatggttttttttaggaatagtttttgttaatttttttttttttttgagaatgggttttattgtttagtttaattgtatattttatttttattttgaatattaatatgtggtgattttgaaaattatgttttttaaattatttttgtatagattgtattttttattgtgtgttattattgaagtttttattttgtaagtttagtggttaatttatgatttgatagatattttttgaaatatttttagttaaaaagaaataagaaaagaaaatttaatttttttatttgggttttttgtgtgttttggggtatgtttttaatattttgttgggtagtttataatattgttttggtttttattttttatttgtgtagatattgaaagttagtaagaggtgtgaatatagggtatttttaggtgttttgtgagtttgtgcgatatattggttatgaaggaggttatatagatttttagggatatggaagttttttaaaatttatatttttattttatttatttagttttttttttaggtttttttgtatgtttattattttttttatgtaatatatttttgttttaagggggtagttgttggtttagtggtatttaaatggttttagtagatgttttttgtttttgtgatttaagagagttttgagtagggaaaataaatgtaaattatttatttttttttttttttttttttttttttttttagataaggttttgttttgaagtttaagttggagtgtagttgtacgattttggtttattgtagttttaattttttgggtttaagtaatttttttattttagttttttgagtagttgagattataggtatatgttataatgtttagttaatttttgtattttttgtagaaatggagttttattatgttgtttaggttggttttaaatttttgaatttaagaaatgtatttagttgagttttttaaagtgttgtgattataggtatgagttattatgtttagtttaatgtaagttattttttattattttttacggagttatttaataggaaaaggtagataattataatattttgagaatatggtttattcggtttttattggtattggagtttatattaaggaattaggttgttgtttttaagattattattgatttgaatagggaggaatgggttaagggtaagatatggtgttataaagttttgtttttgagttttagttgatttttttggatttgttaggttgtaataaatttttgatgattttttagggttttaatgtagttgattttttattaatttaattagaatatttggtggtaggtttaggaatttttgttttaatagtttttcgagggaatttttttttttttttttttgatggagttttgtttttgttgtttagggtggagtgtaatggtatgatttcggttaattgtaatttttgtttttcgggtttaagcgattttttttttttatttttcgagtagttgggattataggcgcgagttattatatttagttaattttgtatatttagtagagattgggattttttatgttgattagtttggtttcgaatttttgattttaggtgatttttttatttcggttttttaaagtgttgggattataggtatgagttattatgtttagttaagggatttttttttatagtgatgttttataagtatattgtttttgtgtagaggtggtttttggagtttttatgttattatgttttttgatgttattttttagttatttttgaattgtgtttatgtattagaatttttgatttgttaagtatttttaggaaatttatttaaatggtaaatattattaagtatttattttattttgggtattgtgttttatggagttgagttttagataaaagaattaaatttttttggattttatagaagttaaaggtgggggtgggaagataaataaagaaattatagtatagtatgttatgtattttatatgatttttttttttgaaagttatattattaatattttatgatagtattgagttatatatattaaagattataaattaaaatttatgtttttttttttttttttgtttttatatatttttttgtttttgtagatattttgaaattgggtattatggagatagtgtaatagttttatttatatgataatgttttgttttatttttatttattaaagagagatttgttagttgtaaatttttagtttgatattggtttttttttagatttttgatgattatgttgtttttggttgttgtggttgataggggatagttagttatattttaattagttgttttttagaggatttgtgttttttttgtggtaaattttaagatatttgtttttttttaatattttttgttttagtgtagtatgagtaaatgtggatttttttttatttatagtgttatgatattgttaggtatgagttttaaattttttttaaaataattaatatgttagtatgtttaattttttgttttttatttttaaatttaatttttttataaagtaattttttttgattatttgttttattttgatttattttgattatttgttttagtttgatttattttggttatttgttttattttgatttattttagttatttgttttattttgatttattttgattatttgttttattttgatttattttgattatttgttttagtttgatttattttagttatttgtattattttgatttattttgattatttgttttattttttttaaattagttaatttgaattagtttagtttgtgcggtttaattttagttaataggggaataatatagtagtaggggttacgtgtattagggataagaattttttttttttttttgtttaggggtgtgtttattattgttttatttgtgagggtatatttttgtatagaagtaattgttttgttgagaagaaaaaaagaaaattttatatttgagtgttatttttttgtggtattaagattttatttataataatatatttttttaatattttaagataatttttttttggaatgtttttttttatttatttatttttttttttttaggaatttaattagagaagaattaaattaaattttatttaattattatatatattgtggaatttaaaataatggttttatatatatgtttaagttttaagacgtagattatttagatatgttattttatatagtaaaagggattttgttgatatgattaagagtatggatttttagatgtggagattattttgtattatttgagtggttttaatttgattgtatgatttttttaatttggagatgattggagaaatatgggttagatggagtgttgaattttatttagaataattttttaatttagtaaaataatattatttttgttttttattttttaattaagtggtaaaatgtattaaaaggtttaaagtttaaatatttttgtatttttgggttatatattttggttaagatagtttgtttataatatattggttaatatagtttattaatattttttttagaatttttatatttaattaattaaaagtgatttttttataataggtaaatagtagaagggggtaagttttttattttataaattatttaaataatatatgaaaagaaatggaagattgagattataattttttgttattcgtaatgaatgaatagatttagttattgaatagtaatgataatttttattattaaagggaaataattagtattaaatttttttttttgttgaaaaatatgatatagtattattaaaatttacggggaaaaaaatttgaatagatgtaaatttttatattaaattataaatttttagaaaatgtaggtaatagagatgtatattaaattatagtttggggtgtaatttataaaatataaataataggaaattttattagataatattaattttaaagggataatttatagaataaataagaataaaaaatttatttttattttttttttttttttttttttttttttttttttttttttagtggtacggtattttttattttttttaattagaaaaataagttttgcgtttttgggatggaggttttaggtgagtatcggaggaaggggttcgggtgggtggggagcgagggggttcggaggttaaagtagatgttgtattagaggttggttaggattcgggagggtttgcgggggtggggtttttatgagtaagtgcggggtgttggaggttagtagttgtttggtttgggagttagggatatttattttttttttgatatttgaggtagtttagttgggtaagattaggtttgtaggattagagttttttgttacgtggcgtaggggtttaggtggttaacgttgttttttggaggattattggttagagtttgtttagtttttttgaggtttggagatagttaaagtttttttaaatatttttttttttttgggcgagtggcgtgttttggattttagaagattcgagtggggttgttttgagattaggttttgagggggtggtaatatttgattataggtgggggtcgtggaaggggtagggatgggtttaggggtagttttgtagtgtgaggtgtgttcgattatatgtaggttaatagttagacgggacgttgtaggggattgtggggaagtcgggagaaggcgttgtttattttgtggggtttttttcgtttggagattttgtaggtaattttttagtgtatgtttacgggggtggtggaggtagagttttgagaggtgggggtgggagttttcgggttttttgtaggttttgatttattagatgggtttatgtgttttttgtagtttgggggttttggaggtggatattagtattttttgattattagggggagggtttggattgaaatttatatttttattattcgttattgggttattttgtaggaattgtagtattttatagattttttatgtttagtacgttatttatttttatattttttcgtatatatgtatatatagtacgtatatattaggtttacgcgtttcgtataggtggtacgttaggggtaagcgtgtacgtagatttagagatgtaaggatagtattggtaatttagaggtatagaaagacgttgaggggtttttagtaaggttttcgtttttaggggttgtgttttttttttagggtacgtatattataggtagtaacgcgggtgggggtattgtgacgttagtggggggagagggagtatggcggggcggtaggtagacgcgggtttatttttttttttggtgtggtgagttttagtttgatcgtggtattgtaggggttttcgtttttggtcgagttttaatttttaacgataaatagtttagttttgtttagataaggttttaggttagttcggtaaagtatttttagttcgaagggtaatgcggttttggtttttggggttttgttagggtgtagattatattggagtgggttggaaaatttatatggggaggtgtttgtaggtattaggttttagggtttatagatggggtttgacgggttatttcgggggtataggatcgggtttatcgggatcgtaggggtcggtagggatggtttagggttaggagcgagagtcggggttgacgggtcggtattagatttaatagggatcgtcgcggttggtataggagttttaggagaggtcggtagggtgggttcggttgttttaggagtgaagggcgatcgggaatggggagtaacggttggggtttgtagggtttgttggggtttatgagcggtcgtaggggttggtagggttgttttgggtttatgagcggtcgtttgggtgggtagggttgtttcgggtttatgagcggttgtttttgttgtttcggtcgtttcgggtttaggagtgaaggcgtgagtgggtcgggttgttttggggtttttattaatcgttggggttgtttggggcgtagtagcgatcgtcgggggcggttgggttggtttagtagggattttcggggttggtcgtattgatacggggttaggaaggttcgtcgggggtagtagtattgttttgggaggaagttggcgggtcgtcggcgtggtcggagggtgaggagtggtcgcgggggttggtatcgttggtattgggttagtagcgattataggggtcggttgcgttgttttgaggatgttttatcgggttggttatagtgatacgggttggtttacggtcgtaggggtcggtagcggtgttatagggttagtagggatcgtaggcgtttgtagcggtgttttggggttaggaggaatcgtaggcgtcggtagtagaggtaggggattaggagggatcgtggggttaggagggatcgtaggcgtcggtagtggtgatacggggttagtagggatcgtaggcgtttgtagtattgtttggggtttgggagtgtttaatgcggtcggtagggttgggtcgggcgtgatcgttggggttggtagagttgatttggggatggaaggagtcgttggggtcggtagggttgatcggggtttagaagtgatcgtcggggttggtagggttgttttaggtttagaagtgatcgttggggttagttgcgttgatttaggagtggtcgttgggagggttggtagggttgtttagggttcgggagtgtcgacggggttgggagggatttttggggttggttggattggttgggttggagttgttgtggcgttgggtcgggtcgttttggttttagtggttggttgggagcggttttttttttggggagtatatttgtttggagggttgtagtgggatttttttcgttttatcgtaggcgggttcgaggttttgttcggggttgtttgtttttaggggtcgtttgtttttattgggtttcgtaggggggtaggttttcgattttcggggttttttgatgagacgacgtttttattttttttttcgtttatgtggttttagggttatatttttttttagggtttttagggtgttgaagttggcgatggcgaagtcgtcgatgattttttttttttgcgagttggattcgcggcggcggcggcgcgggggacgcgcggtgcggggcgcgggggcggcgtttcgggggggcgcgtcgcggaggttcgcgttttttttgtcggggttgggttcgggttcgtcgttcgacgacggattttgggcgcgggcgtcgcgggcggtttttcggcgtcggttacggtttcgttgcgcgcgcgagcgtcggttcgggcggattttggtttttatggtcgcgcgtgcgtttcgtcgggtcggtgattttgacgtttcgcgtttggttcgtagtaggcgggttttttcggttacgcggcgtcgtcgggttgagtgtgcgtcgcgcgggttcgggttttgggcggcggcgggcggcgggtcgggtcgggtatgtcgggcgcggggggcggtttagtttcgggttcggcgcggtttgggattttcggcgcgggcggttgggcgtatcggcgggggcgggttcggcgtttagcggttttcggtcgttttttcgggggcgcgttttatgcgcgcggcgcggcgatcgggtcgagcgggcggggtcgggcgggcgcggtaggcggtaggcgggtaggcggtcgggtttttgggtatcgggttcgtgaggcggcggcggcgtttcgaatttaaaaaatttatttttaaaggtaaaattaaattattatttgggatgatgaaaatataaaatagaataaagaagtgaggattataaaagttaggatgtgatggatttttatttgaaaaaataaaaatttattattgaattgggttaattgatggggtttttaggttagttgataaatttttttttttttttgatggttaaagagtgtttattgttgattaaaggttattattttaagatttttttttttttatgttatttgtgttttatgataaaaaggcgaacgtagaataaaatgagttatggggtacggtttttgttttgtataaagttttttttttatttttttttttggatattgagtatttagaataatcggtagttttaggatttttggtagggttgttttattattgagtgtgtatttagttttacggtttttgttttgtataaagttttttttttatttttttttttggatattgagtatttagaataatcggtagttttaggatttttggtagggttgttttattattgagtgtgtatttagttttacggtttttgttttgtataaagttttttttttatttttttttttggatattgagtatttagaataatcggtagttttaggatttttggtaaggttgttttattattgagtgtgtatttagttttacgtcgttggagataatgtttatagtttattttttgagttttggatgaatttgataggatatagttgaggggaagtttggtttagtttgtaggttttggttattagtgtagagggaggaggtttttatttttttattggagtagttataattagagttttttttttgcgtgggagtgaggttcggttttttttttgaatacggtgatagggatttttttataggtagagatgatattattttttttgtaatatggtttaattttacgtttgttttgttttataagaaagttgatttacgttggtgttttttgaagaaattataggtatagaggagggataggtggattttagggttgtgtttgatttgggaaaggaagagtgtagatcgttaggtggcgtcgttgtattgtttttgcgtttaggaggtgtttgttggggttgagattgaaggtggggagaaggatgttatagtttatcgtataggttttcggtaaaaatttttttgtttagtttagcgggtttttttttaattaattgtagcgaaaattgttttttttttacgtttttggaaggtgttttttgatataagaaagaggatgtgattgttagggttattatgttattgtttattgtgttgttagtaaagtgaaattaaaatatataataaataataaaataatttatgataagttaatgtttataatgtattaatattattgagttagtgtttataatgtattgatatattttaagtgtgggtatagttgtagatatgttttgttttttgggttaggatatagggtagagtgaaatggaaagaaattttagttattgtagaaaagggtttttatggaagaggtttggtagggaggttagttgttttagggtcgttatatttagggatgattttttttttttgggtagtattggtttttttaattatttttgtatttatagtagttttgaaattgtaggatgttgagatttagtattggttagttatatcgttttttttttattattaaatattgtgttaaatagtatttttatatatttttatttttttttaggagagaattaaaataataatggatatattgatgtatgtaaaaatattttaaatatgtgttattagaagtagttattaaaatattaattttattgaaatgagggaggttgtaaaaaagaaaaatattgtatattcgtatttatagtaatattatttattatagttaagataaggaagtaaataaagtatttattaatatatgaatagatgaagaatatgtggtttatgtaggtaatggaatatgatttaattttaaaaagaaggaaattttgttatatgttgtaatatggatgaatttggagaataatgttaagtgtaataagttaattataaggaaattttaatattgcgtaattcgttatatgcggcgtttaaatttttagaatttgaaagtagaatggcggttgttagtggttaggttggggggatttttgaggagatttttagcgtagagttttagttttgtaagatgaaaagttttagagatttgttgtataataatgtgttatagtttatattatagtattttatatttaaaaattgttacgatattaaattttatataatatggattttggcgtaatgaaaaaaataattagttttgatattaatttaggaaaagagtatatgaatttattgaaaatatattagtatgtgtttattatgaaaaagagatgtagaaaattgtgagataaaaagagagatttttgttattttagttattatttatgaattagtagaattagtattttatgaaattggatagaaaggtttataggtttagttttgataggttgattagtttgtatttgttaggattttaggtggttttattgtatgtaaagtatcgttttagatggtggtggagggagattttaggaaggtgattttgttttataggtagaagtttttagtttagatgggagtagttagaagggtttaggagggatatttttaagaaagtaaaattaatagaaagtttaaagtttttaattttttaatagagttatagaaatggaatagatattaaagttaaattaatgagagttatttagaatataaataaaaataaaggtaagtattaatttgaggaagaataaatattacgaagtaagtgaaaagtagttaagttgatatatgagaagatgagttacggaaaaagaaataaggagtggttgaattaaatataattattatataaatatattgggaaaaggaaagaacgggaagagtgaaagagaataagtgatggatgtggtgacgtcgcgttttttcgggcggggtcggaggcggtatagatgagggatatatttatggttaataggatcgtttttttcgttttgcgttttgtttgcggtcggtagtttttttttttcgtttatgggcggtggttggaggtaggggtgcggaattcggtcgatttcgttgttttcgttttttattttgtggcgtcggtggggttggggagatgagtttttcgacgtagtaggtatttttgtttattttttatggttgttgttttttgggtagttttttttcgcggcggtggggttgtttcgtcggtttgttacgttgtttttttttgggtttgtgaggattggtttcgtttggatttttgcggtgttttcggagttttttaggttgttttttcggtgtcggaggttaagcggtggtgttttttttgtttttagcgttttttttttttgtcgttgttgtagtgtttgtgtgtgggttttgaggggttttggggaggtagaatatttttatttatttaaataaattaaaaaataagaaaaaaatataaaaagaaagagaataagtaattttaattattgattttattatcgtgtagtgtaatagttaatggttgtaattgaaaaattaagtaatgttaataaagaaatggtgttttggtgtttagatatgtgaaagtaaagttaaaagaattagttgaaatttgaaagtggttgttttttagaaaggtagaaatagagaagagaggattttttttagaaaggtagagaagattcgttttttttaggaagttttgcgtaaatatttatttttttaattatgtgtaattgtaatttcgaataaaataaaaataaaagttttagttaatatgtaagtttatgtttaatgataattttgtttaataatgataaaaggttaattaaaatataaaaatatttaaatataaaatagtatgtataaatgtgtatgtgatattaattttgaatataaatttgaaagaatatgtttataaataattttggatagatagtttatgaatgaattttttattttagtatttttattggttgttttgtgagtttaggtagggaggggattaggatttgattagggtttttaatatttttgtttttaggtaagttttgtatatatttttgttgtatcgagggtttttatttttgttttggtttgttttataggtgtttttttaattttttgttattattgttttatttgggtggagttgaggtcgttttgattaagaagagcgttatttatttatgtgttttaaaattagaaagttaaaagaaattttgtaatagggttaggaattattttatttttttattttcgaattagtttgaattgatggcgggagatgttgatgtttgttttatttatttttatttattgtgtatttattttttattaatttagtttatattttttagaagtagattgatttttattttttataattaggaaattttagagtattttttgttttttttagaatataatattttagttttgtattattatatgagggttttaattttgtagggtaggtgtatttttatagttttaggttttgaatatttgttttagatgtatttttatttttttttagatttgtttgtgttgttttgaatttgtttttttttgagaatcgatggggagatattagggaggaggggagatttttttgtgttatgttaatgtatttagatagagtttttatttttttttgaattttaattttatttttttttagatatttgaaataaaatatagattagaaatgtttatttagaagttaaatatttatagtataaaatatgaagatagagtagaatggggtaatgtaggagagtgtgatagggtaaggggattttaacgtgttaggaaagttggtttttggtttttttggaggagtcgttattaggatatttatttataaagtttatttgtgataatataattatatgatatttaatgtattaaaatataataaaattataataaaataataaaaataatatggtatagttgtaaatattttatatatattaataatttttatttatttaattataagaaataaatgttgttatattttttattttatagatgagaaagttgagttagtaagagaaaaagtgttggtgagatttgggtagggcgtttaatttaggtcgtttggttgtagagtgtaggtgtttttagtagagttagtggatttgcgagttgatagcggagattgaaatttcggttgtgtattgttttggtgtttttttgtttgagttaggtgttgatttgggttttgtagatttatgtgttttggagaaaagagaaaaaatagtaagtgtttttttgggtgtatagtgttgttttttattttttgaggatttttttttttttagttagttttaaattagatttatttttttttcgagggaagatgacgtttgtattttttttttttttttatggtattttttttagtttttgttagtttttttttatgattttattaatattagtttttgttttgtgtttattatttattaagtaaggaggaaaagagttttaggattaaaggataagatttgggaaaaatttagtgtttttttttttttttaagtttggttagttttgatagtgggaggattttttaaagagaggttttggttttggttttatgtttttttaggtttgggttgggttatacgtatagttttttttttttttagtttttagttttattttatttgtagagatatttgtatataagggtaggttttaaatattgtggttttgttttttatttgtagtttagtgtttttttatttttagttttgagtaggtagtttttaattgggaagtttattaagaattttattagtacggtaggtttagtatggaaatatgtagttgttatggggtttgtagttgatttgattttgggaatttttttgtttaaggaggttttgtttattttgatttttaggtttatgatttgtatttgggttaagtttgttttagtttggtttatttatttttggaagtatagtttttttttagggttgttgtttggggaggttgaaaggttttttttttttgtttttagtagggatttttagtagggattttatttaagttattgtttttatagtttataggggatttttttttttttgtggagtagaaagttttttgagattttttagtttgaggttgtttttgtttattttttgtatttggggattgttattgttatagttatcgttttttatatggatcgttttggagagggagttttatatttgagtttttgttttatttgatatgtattataatattagtattggtggaaatttttttaagatttagttgaaattacgaatatttttattggatattagtatttaaagtaggaattttgagaaattagtatataatttttttattttttttttggttaatgttttagtaatttataaggtaatcgttttcgtttacggggaattagaattgataatttttttttaggagatattataggtgagagtaggagcgattatagatttgtattgtttttgttgtgggtgttttttggatagggtttttttgttgtagggtaggggatgaattattttatttgtttaggtttgaggggttaattgatagtgtaattaggtttaaggatgagaaattattattttttgttagatatatagaagtggggaaatggtagaaagattcgggttttttagatattttaggtttttagtgttttttgtattgtttttgtttttgtagaaatataaaatttgttgtttgttttttttttttttttttaaataatttgattgtgcgggaaattattttgattattttttattttaaatttaggtagtgtttatttttttaaaggtattttgtgattgtgtaagtaaatataaatgtatatgtatatgttttttttttttttgtatataaattttagtaaattatatatgtttttttgtattttgttgtttttttttattattgtattatggagattattttatgaagaaatattaagaattatattatgttttttttttttttgtttaaaatttttttggtaatttattgtataggtgtgtatttttttaaatagagattattttttttgaatgtaatgttttttaattagttttttgttgataggtatttggattattttttttagagaataatttgatattatgtagtattatttgggaagggtgtagtgattttatttttatatgtatattttaggggagtttatgtatttttggaattagaaagtaatgttttagtatgtttattgtagtagtgtttttaatagagattatgtagaggttaatgaagtggggaagagataaattgtagtatattttttttatggaatattatttagtaatgaaaataaatgaattatttgtgtgaatattgatttatgttatagattatgttaacggaaaaagtaagtaaatgtataataaaattagtaagaaataatttataaaaagtttaaaagtaaagttaggtaagggggtttatattcgtaattttagtattttgggaggttaaggtgggtagattgtttgattttagacgttttagataagtttgggaaatatgataaatttttttttttataaaaaatatagaaattagttaggtatggtggcgtgaatttttaattttagttatttaagaggtttagaagggaggaattgtttaagtttggtaggtagaggttgaagtgagttgtgtttgtgttattgtattttagtttaggtgataaagtgaaattatgttaaaaataaataaataaataaataaaaataagagattttttaaaatttagtaagaatataggggtatatagtaaatttaagatatatatttattaatagtttttgttttgtttagtatagtattgattgaaatatatgtatattagaattgtggaaaattagggttatttatatatgtttttgttattttttatgtatattatatatagttaataatattaaaatgttataaattgataaatttggatggtagttttataaagattttttataattttttatttttttttttagttagaattattttataataaaatttgtgaagtgaatttatagaaattgagtaaaataaaaaggagtcgttgagtgtgaggaaagttgtaaagaagtaaagataggtggagatatgataatattgagtatgttagtgatttttatagtaattgattttttggaggagtgtgagtttaagttagaatgaagtgatagatcgtgaaagacggatgaaggagtagtagtttttggaggtaaatatggtgtgtggttggttggattgggatatgtggagggattttgaatattttgttttaggtttagtattagagaaagaggatttatttttatttagtattttttataatttgtagagaaatttgaaatattgtaaaagaagatatatgaatggttagtttagggaaaaatgtaaagtaaaattatagtgagaaattattaagtaattattagaatggttaaaattaaaatgattaataattataaatgttagtaaggatgtggaataatttgtatttttttttattgtttataggaatataaaatatttattttgaaaattaattttatattatttaataaagttaaataagttagttttttatagttattatttttatttttaggtatatatttaagagaaatgaagattttgttaataatttttgtataaaaatgtttatagtttttttatttataatagtaaaaaataagaaataattgttaatttataaaaattatgatttaattatataatggaatattattagtaatgaaaatgaaagaattattgatacgtgtattaatatgggttgattatataggtattataataagcgtaaaaagttagatataagggaggttatatgggatgagtagatttgtatgaagttttaaaataggaagaattgtgttattttgatagtcgttagattaatggttgttggaggtatggaagttgagttgaagggagaaaaagggatttttgtgtatattgatagtggtaagagtaatatgttgtatttgttaaaatttattgataaatttgatgaagatttgattattttggtatatgtatattttataagtttaaaaattttataataaaaattataatgttgttgataaaaataataattaaaaatattagtaataaaatttaatagtatattaaaagaataatatattatgatatgtttatatatggtaaatatagagttaatattatattgaatagggataagtttatagttttttttttaagatttcgaagaaggttaagatttttatttttattatttttattttatatagtattagaagttttagtaagagtaattagttaagaggaggaaataaagggtatttaaattggaaaggagaaagttaatttagttttattcgtaaatggtataattttttatttagaaaaaattaaatattggtcgggtgcggtggtttacgtttgtaattttagtattttgggaggtcgaggtaggcgtattacgaggttaggagatcgagattattttggttaatatggtgaaatttcgtttttattaaaaatacgaaaaaaaaaaattagttggtcgtggtggcgggcgtttgtagttttagttatttaggaggttgagacgggagaatggcgtgaatttagggggtggagtttgtagtgagtcgagatcgtattattgtattttagtttggatgatagagcgagattttattttaaaaaaagaaaaaaaagaaaaaattaaatattttattaaataaatggtgagaattaataagtaaatttagtaaaattatagaatataaaattaatgtgtaaatttttagagtatttatatatataagtattatataatttgaagaagaaattaagaaagtaaaattatttataaattataaagaggataaaataattaagaattaatttattttaggaagtaaaataaaaattataaggtattgatgaaggaaattgaagagtatataaaattggaagagttaggtatagtggtatatatttgtaattttggtattttgggatgatgagataggagaattgtttgagtttgggagtttaagattagtttgggaaatatagtgagattttgtttttaagaaaaaaaataaaatatataaattgggagaattaatattgttaaatattaattttaaaaatgagatatataaattttatgtatataaattgggagaatattgttaaaatgtttatattatttaaagtaatttatagatttaatttaatttttattaaaatattaatattattatttatagaaatagaaaaaatcgtgaaatttatatggaatcgtaaaatattttaaatagttaaagtaattatgagtaagaagaataaagttagaggtattatatttattgaatttaggatataatataaagttatagtaattaaattagtatggtgttagtataaaaatagatatatagattaatggaatataaaagagaatttataataaatttatgtattgatagttaatttatttttggtaaaggaattgagaatatataatggagaaagaataaaagtaataatggagaataaatggagttgggaaaatgttattagatgtagaagaatattattagaatcgttttttattatatatagaaattaatttaaaatggattaaagatttaaatgtaagttttaaaattataaaattattagaagaatgtttataggaaatattttagatatgggtttaggtaaagattttatggttaagattttaaaagtataggtaataaaaataaaatagataagtgggattatattaaattaaatagttttagtatagtaaatgaaataattaatagaatgaagaggtaatttgttgaatagagaaaatatttgttatgtatttatttaataaggaattaatatttagaatatataaggaatttaaaaaatttagtagtaaaaatataaataatttaattaaaaaatggataaagtgtttgaatagatgttttttaaaaggagatatataaatggttaataggtatacgaaaaatatttaattttattaaatattaggaaaatgtaaattaaaattataatgaaatattattttattttatttagaatggttattaataggaaataaaaaataatggatagtggtgagtatgtggagaaatgggaattgttgtatatttttgggaaagtaagtatagtaattatggaaattagtataatgattttttaaaaaataaaaaatagaattattattggatttaataattttatttatgggtatttatataaaggaaaagaaattaatatattaaaagattatttgtatttttaggtttattgaagtattatttatagtagcgaagttattaaattaatgggtgaatttattaatgggtgaatgaataaatggtggtatatatatatatataatggaatgtaatttagttataaaaaagaatgaaattttgttagttgtagaaatatggatgtaattaaaggttattacgttaggtgaaataagttaagtaaggaaagataaatattatatgttgttattaatatgtgcgagttaaaaaggttaattttagggaggtagagagagtagaaagatagtttttagaaattgggaagaatgtaggggtgggaaaatatagagatgtaggttaatggatgtaaatgtttaattatataaagaaaataagttttaatgtttgatagtatagtagattgattaaagttaataaaaatgtatattttaaaatagttataagagtggatttggttgggtatggtggtttatgtttgtgattttagtattttgggaggtcgaggagggtggattacgaggttaggagatcgagattattttggttaatatggtgaaatttcgtttttattaaaaatataaaaaaaaaaaaaaaaattagtcgggcgtggtggtgggtgtttgtagttttagttattcgggaggttgaggtaggagaatggtgtgaattcgggaggcgaagtttgtagtgagtcgagatcgtgttattgtattttagtttgggtgatggtgtgagattttattttaaaaaataaaataaaataaaaaagagtgaatttaaaatgtttttaatagaaagaaatgataaatgtttgaggttatggatattttaaatattttgattgatatatatattttatgtatgtattaaaatgttatatgtattttataaatatgtataaatattatgtattaattttaaaaaatttaaaaaataaataatataatatggggtatttaaaaaggtataaaaattatgagtatgataaaaatttggtaaatatttttttttttattaagattttttttattttataagtttaaggagaataaagtttataaagtattagaagaagttgtttttttgaaagagatttttttgtttagttaaaaagatagaaatagaattattggagtgagtaggattttggataattgtatagtattatgttttagtgtttgggattatatagatttagggaggaggttttatttttcgggaagaattaaattttggtttttttttttgttttttttattgtaagattaaaattttagaaaattaagagaaagattttagttaaagggatgtattgtttattatttttttttattttttagaatatttattgttaaagacgatttagattgttataagaggaattgtgtttttacgttattaaaatttatatgttgaagttttatgttgagaaggtagaagaagtggttatttataagtaaaggaaagaggttttagaagagattaattttgtagtattttgattttgtatttgtggtttttggaattgtgagataatatatatttattatttaagttatttagtttttggtattttgttatggtagttttagtaaattaaaatagaaatattattttttttattttgttttatgtatgaatatgagatttttttaggagtatgaattatttgagattttaaaagatagagtgaggtaattgaaaatagatgatatagggttatttttaagtttttgagtgttttttggttattatagaaaaatgaagatgtttttatttttttttagttttatataaagtaaaagttgtagatttaaattgatatagaatcgttaattgtattaatttatttgagataatgagggagttagttttgtttaaattttatagaaagacgatgaataagtagtaagttaaagaggttttttttgtaggggattgtaggtattatatgttttttttttatttttaagatatatttttttaaaaggttttgtttaggagtaaatgttattattttgttttttttttttttaattgaattattggtttttttttgtattttagtaatgttgttagtatggaggtgtttgtttatgatttatagatgatttaaagagtagagagttttttttgaggttatatagtacgtaagcggtggaataatggtaggtacgtgattttttaggtttttagtttagttttttgggttttatgagaattatagtttttggtttttgttatatgtggtttttttttgagttagagaaggaggacgtatagtgagaagaaagtgtcggagttttaagttttggtttagatttattgggttggggtatggagagagaggttgttattgatttttttaattttagtttttattattagttattaagttgaaagtaggaaagtttattttttgtatttggtttattagaattaagatggtagaaagttttattatttattatggaaaagataagggttttttttattttgaattatgatttagttttttaattatatatgtttttttgtatatgtagttatttttttttttattaagttttagtatttatagtgtaaatataggagatattgagtttgatgttttgatggaagttttgagttgagattttattttatatttaggtgtttttgaattattagagttttttgtttgattttattttggttttattttaattaaggtttatatgttttgggatttttttaggtttttattagaaatgaaaaaaaaaaaaaaaagttatgtttagtttttgggttttttttgatagtcgtgagaggtagtttttaatgggagagagttttggggtgattaaggttttatagattttattatttttggattatatggttttagttttttgattataatggattagtggttttagatttcgttttaatatttgaagttttttgtttttcggttttagtaaatgttttttggttgagatgaagggaaaagatatagagacgtaaaagttgtgattgtatggaattttgtttaaggtatttttcggtgtttttttatttatgttagttatgtttttatgaatttagtgaaatgggtatgttgtttttgagtggaagtgaggggatattattgggtagagtttaatcgaagggtggttggtgttttttatattatttatttatatatattggggtttttttagtatgaaatgttttagaggtagttaaattcgaagtttggtttttttaaggaatgagtgtgagtattatagttttggttaatgagtattgaattttagagagattaagagattttttaaatattgggatattttagttttgaattttagaagttggttttttgtttgggaggtaggtgttattgtatttgatttaaaaaagtagttttatagtttaagatgtttttttggatttttgtttttttttggtttttggttaagtaaatttttattgttttgttagtttatttataaatttaattagattttttaaatatgtattttttttttatttttttagttgtagttaatgggagaagtggtttaaatgatttaattagtaattgttggaaattaaagtaatagtatataattttatgtgttaatattatatattaagagagaaaatgtatagatattagtagtagttatttaagtattgtaataatatttatttatattttatgagtataatatatataaataaatgataataagaaaataatttttatgtgtaatacgtgattatgattttgatagataaatttgagagtatagtacgacgatatttattatttttatttatgagttagatagtgtgaaatgagaagtagagatttgaaatgtgttgtaaaatttttttaaagaaagtagagtaatatttttcgtgagtaaattaaagtaatttttttataaattatattggatttataatgtgtgggatgtgtttttattaaaatggaggtaattttaggtatgtggttttttttatatgaatcgtattgttattggtttattagttgttattttattaataatcgttttatttaataaaagggagatttttttatgggttagtattttttaggtggaggttttttgtagatataattttttaatagagaatttttttgggaatttagaaagaagagaagaggtttaagtaaaaaggatgaaagaaatagtaataacggtcgggtatggtagtttatatttgtaattttagtattttgggaggtcgaagagggtggattatttgaagttaggagtttaagattagattgtttaatatggggaaattttttttttattaaaaatataaaaaattagttgggcgtagtagcgggcgtttgtaattttagttattttggaggttgaggtaggagaatcgtttgaatttaggaggtggaggttgtagtgagtcgagatggtgttattgtattttagtatgggtaacgagagtaaaattttatttaaaaaaaaaaaaaaaaaaaattaatagcgataatattatatattgttatggtgttatgtgttaatttgtgtttttagtatttttaaaatatgaatttatttaattgttacgatataattatggggtgtgtttgttaatttttcgtttttaggtgatataataggaaagaaggtcgtttataagtcgtggtggagttgggtttgtacgtagataattttgttttagggttatgtttatatttttgtattatttagaatgtgagggtgggtggagagtttagtttagggagagtgattggagagatagaataataagaagagtgggtagattggattattttgatggttttggggttttttttttaggagagaagaagataaaaattatgttattattaaggaaagtatttaaagtttttggtttaaatttgggcgtttttagttttgggataggtggttgggtagggaagataaattaaggtaagggtttagttcggaagagtttttttttttgagaattttgtaggagtttttttgattttatggttattttttatattttgtttttgttttttttttagggtcgatgagggcgtcgtatttggtttttagtggggtttaaagacgttattagagtgagtggagattgggttttataaagtgggagatttttaggattttttttggaatttaagatttttagagaagtcggatttcgcgtttcggaatttaatttttgttgttttatgagttttgattttggggagaattgggttagtgaggagaggattaagatgaattgggttggggaggtaggaggtaaagggcggtttggagagtttagtagttttttttacggcgtttttgtttcggtttagggtttgtagattttttaggttatatttttaagtacgtcgttttacgttattttttcgtggtttttgtttttttgttttttttttagttttttttatatcgtaagaagtttttaggtaagcggttttagggtcgggcggtaggtaggagggagttcgggaggttgggttttcgcggggaggcggagagagcgcgttagggagatagggagcgggcggggtttttttttcgtttttaaggtgtcggttttcggggtttaggttcgtattttcgggtatttggaggttaggggagagggaggattgtggtaggtgaggtaaggagttgtttgagtcgtttagtagtttttaggagttagttttttttaggtttgtttttattttagtgtttggttttgtttaggtttttatttttattttgtttttaatttggttttagataggattttaaataatttttgtttttaatgtgaaaaatgtttttgtcgttttaggtagaatttgttttagagtattggcgtagattttcgtaggttttgtgtttgaattttttggtattgtgtttttttttatttatttttttgtaaggaaggaattatattattggttggatgagataattggtttagatgggtttattgagtatttatttattgggtaagtgttcgtcggggttagttttgggttagatgtgtttaaggttttatagttagttggtggaaaggtttggagggtttatatttaagtttatttgatttgaaaatttatattgattttatttaagtattgattttttttttataatttatgttataaattttattgttttattttaagaaattgttatagtagtttttagtaattatttttttgaatagttggtagttattaatattgaggtaagattttgtttagtaaaaagattaaaattagttgaagttttagacgatcgttagtattttttagtaatagagtaattttaaattaaggtatgtatatagtttttttatatataatgttattgtatatttaataggttatagtagagtgtgaatataatttttatatgtattggaaaaataaaaatttgtgtgatttgtttgttgttatggtttgaaattaaatttgtagtatttttgaggtacgtttgtagttttttttttttttttttgaatttgttttttgtttttgtttggttttgtaagttgtatgagtttgttttttttggtaggtttggggatattgtattttttataattttggtttttggtatatgatattggtattaagttttgttggattagtgaggttttttatatattttttgaattagagtaaaagttttgtgtatatatcgtgtatgtgtgagtttgtgaggagacggtgtttttttgtaggttgttttgaaggggtgttttgttgtgattggaggaaatagttatgggtttttgggtagaagtggtttagaatggaatggatggttttagttttgattatttgggaataggaagatttttagataaaaatttatgttttagaagataaaattgtttaagagtggatagtagttaattagtaagttatttgggatattattgtatattgggagggaagatggtttttgttatggtgtagggtgtttgatttagataaggaggtttttttaggggttagtgtttttgaagtatttttaaatgaggataaatattttatgtttatgattagtcgatttgtgtttatttagtggaaaaagaatttagaattttgtaaaatttttagagagagggattttttttttgttttttagtgttagggttatgtatgattcgtgtttgaattatagtgtgtatttagttgaaagttttaattattagaatataagaggtttaaattattgttgttatagatatgtaaaattatatagtataagtttaaataatttataattaattaatagtgaagatagattaataatttttgtaaatttaaaataagattggtaattttttagaaaaaaaatgagatttttgtaaaataatttaaatgatatattaataataaatttttatgaaaatgatattttaattatttgaatttttgttttaagttataaattttaaaatgaattaatttttaataatttatagtagggagttttaagttataaataaaggtgttaggatagatttgagatttggagtgagtatattttttagggttataagttaattttgtaagatttttttttttttagatattttatttagttattaggaggttaagaaaagttttttatagtattaagatttaattattttattgtttttatttttatggatagagtttaggtgaaagttatttttgttttttttttcgtattttttataggtttagtattatcgtcggtttggagtgtatttggattgagtttattatgttttgtttttgtttgtgttagttatattgggttttttatatattttgtatttgtatttttataaggttttgtatatttttattttgttttttcgatttttttagttatagaaatttttttagtgtattttttggattttttagtttatattagtaaaatttttttagttttttttaggatgtttttgtatttcgtagttttagtagtaatttgggtttttttgaggatatgatttttttcgaagtttttttatatgggggagtttttttagggatttgtatttttgggtttagaggtgaggtggggtttttgttttttattgtggtttttagaattttttgttttttttttttttaaaatttttaggttgttattagattagagttttatttgttttattgtaattattttttgtgggttttaggttgttttttttaattttgagttttgtagtttttggtttattgttattttttttagtattgttgtttttttgatttttggtgattttaatatacgtagatgtggtgggttgagtaatggtttttagagatgtttagttttaatcgttggaatttgtgaataggttgtattgcgtggtaaaagggatattatttatgtaatgaagattaaggattttaaaatagggagattttgttggattttttgtgtgggtttaattaaattataagagttattaaaagtagagagtttgttttggttggagttagattttgtagaggaggaaggtagaggagaagttggagaggggaggttagaagttttaagtaggaggattgaatgtgttttaggtatcgtgtgtgagtatttgagagaaggttttaggagttaagggtggtttttaataaggaagtggaaattttttttttatttgtaaggaagtgaatttaggtaagaatttgaatgagtttggaagtggatttttttttagagtttatggaaaggaatgtagattttttcgtatgttgattttagttttatgagattgggtggatttgtaatttatacgattgtgttatgatatataggtgttgtttaaagttatttggtttgtggtaatttttatggtagtaatagatatttatatagtagagaagatgttttcgttttttggttttttagattttggaattttttttttttatgatttttttttgtttgtttgaattttatgtttttgttattttttaggttttattatggttaagaattttagtttttttatattttttattttatattttttattttttgattatttttttatttatttttttgtaaggtggttataggttttgaggatatagatattattattttattatatgttgtgatgtaatattagtggattatttattgtatatgtgtttgttttttacgtttggagtttattttgtagtatattaattttaataatcgttttatttttttgggatttttaatttagtgattttgttatttatttattgttttttattttgggtgttttgttttttttttttatttattttgaattttatggtaaataatttttatttttttttttttttttttttgaattgttatatttatttggtaaaattatatagttggtgggttttatttttgtttatgttgagtttgtttttatgagttgtaggaggttggagagtagtatatagtacgttgattggttttttaaaatttaggattttaaattatataggaagtttttattatggttagtaattattttttttttgtatggtttatttttagtttttttttggtttgggtgatttttatatattttttttttgtgtttatatatttaatttgttttttttatttttattttagttgatgattttgttttttattttattgagaaaattgaatatattagaagataattttatagattttattattgtttgtttatgtatttgtagttgtattatatgttaggcgttttattatgtgagggattgttgtgggttaatttttttgtttttagttagagttagatttttttttggtgttttaattgttattttttattatttatttaaaggtgttagtttattaattaatattatttttatttttatcgttaattttttttttttttttttattggattattgtggtagttatgagaatgtatattttagttttttatttagaagaagtagaattgatgatggttttagtttttgaagtttgaaatttattgttatatttgttttgagattatgtttatttttggttttttttagttaatgattgaggaaagtagggtagaaattaaggtaggatattttttttttgaaggttgattgaagttttagggttttttgttatttttattgaattttttttagtttgtatacggtttaggatgtttttagttgatttttttgtattttttatattattgaggtttagagttgttttgtggtttagtggtttttttagtattttttgttttatgaattttttttataagtattttttttaataaatttttatatgtttattattgtattggggttcgttttttaggggattttaattaatataagtggtatgaagggtgatttatgaaaataggtaaaaatgggaatttgaaataagttttttattgtttggtaggttaagaggatgttattcgggttggtggtagatatagaaagtttatggtataaggtgtagttgagtagttgggggttttattagtgttgagttgagaagttgttttggttagggagtgttatggtatatgtagtgatagaatgttttgtataataaggatagggttggaagaaatttataaagatagtggttttggttagttattttttagttgtatcgatgttgtgtaaaaagataatgagaatttgtggattgttgatagttatgattggttatatttgatattttcggtagtgttttatggataggtttttattttttgtagtaaaagggtagatagtaaggaatgttagttttatattattatgagggttatagtgttttagagatgtttgatatttagttaaggtaggtttgttataggaaagttagggttttggtggggaaatttgagattttgtaaattggaataggattatgcgatgcgtgttttttaggattttttgggtatgtagaggaggtttatttttttttagtaatggtttttatttttattgttggaagatgttatataatttttatttttatgatgtcgcgagaattttatttaggaggtttgtaggaattagttagtacgtttttataggagtttagggattatttttgggattggaatttgagggtgtttgattaaggaattagaattttaggttggatgaatataattttttggtttgaagatatttttttagggtatggatttattaaatattttaggattttgataagtggagtaaatttattgttggggtgtatttatatagtttagaaaaaaatatgtttaatttttaataaggtagatatgttttagttgttttggaatatgtagaggatggaataataagttgaggggagtgggtttggtgaaggtttattaaaattatgttttataagagggtttagaggatatattttttattagagttttaggaatttgatggtgagagggatttgtattattaagaagtgttagggtattgttttttgtaggttgggggtgatggtagtaaagatagttttagagttttatttttaatattattggggagagtgtggttttgaagagataaagattaagtggtggtagtgatttgtaaaagttagagggtacggttattatggtaatttcggaggagaagttaagaggatttaagttgtagggaatgtggggaagtataatagagggtggtgttttagggttaggataggtagttggttgatatttatgataagaaagtaagaattgagaagtaggagggtgaaggtgtttgatttaatataaaattatgattttatttttaatgtttagattttagttaagatgtagatttagattttagtgatagaggaagagtttatatttttaggcggaatattttgtaatttcgtggaagtatatgttgggataatttttttagtttttcggtaaaggattatatagttatttatttaggagattgtatattggggaaaggaaataggtagaattggggggattattgatattgggtgtgaattgatattgatgtttagatgtttatagtattattatgttttttattatagtggggtttatggagtttagggagtaaatttggatatattatggtttataatggaattattggatttatagatttagttttggttatttttttatattttgagtgtataattgatattgatgtattgttaagtggagttatttttattttgggtttttagtttgtggagtaaggatttttattgtgttgaaagttaaagggaaatttttgatattgtttttattttggttaaattaaaaattatagtgtgttttagggtgggttttgtgtaagatattttaagtattgtggggattatattattattatagagttgaaggatgtgggatggtgttggggttgtttattgtttttacgtaatttagtaatttgtttttgaagaagtttgatgaagtttaaagaatgaattagattattttaggtttggttaagtaggagttataattgtagtttttgtgttgtttggatattattggtagagtagattaataaatttttggatatagagtatgtagttgtggatttggtgattgtatttttttttattttaattagaaagtggatatggagtgatttatatttatgtgggatttttaaaatattgatttattatttgttttagggttattgtaatttttttgatttttatagtatagttttaagattatattaaatatattggatatttaataggatattaaattagtttatattattgataattttttgttgatttggttggatgagtagtaggtagaaagtgtattgtagtgtttggtaaaatacgggtattttagaaggtgaagataaattttataaagtttttagagtggttattcggttaggtgtagtggtttacgtttgtaattttagtattttggaaggttgaggtggatggattatttgaggttgggagttggagattagtttgattaatacggagaaatttcgtttttattaaaaatataaaattatttaggtatggtggtttatgttggtaattttagttatttgggaggttgaggtaggagaattatttgaatttaggaggtagagattgtagtgagttaagatcgtgttattgtattttagagtgggtaataagagtaaaattttattttaaaaagaaaaagatagcgggtattgaagtaaagttttatgggtgaataatggttaagtgtttaggggaatgtaggtgtgttttttttaaggtaatagataaattgttttattttgtatttttattagaaagaaggaagtatattgtttgatgagttttttttagttttgataatattattttttatatttaggtatgttgttttggtttatattttaggtgatataggaggaggttagttttaagtagggtttatatagaaaaggattttgtagtagatttaggttatggtgcgagtagttattattttttagattttttggtgttggtgatgttattggtagggaaagatgtaggatggagttgaattaagtattagtgggaaagttatagtgaaaggtttgggattttggagtaaggttatgttatttatagtagagatatatgttatttattagaagtaatttttagtgttttttgttttgattagatagaatgtttaattacgggatattaagtaattatgtggttcgagtgtttgtgtgatttatagagttatagattagataggtttaatagtatttattatgaggtgaaaatggtttatttgggttgagtttgaattttatgtttatatttagagaaaatatttaagtttgaagtggtattgaataattaaatagataaatggaagttagttagtttttattatgggttagttttggtttggtaggatgagtttatgaatggagtaattatagtggtaggtatgaggttacgtatggggttaatagtattgatttttttttattaaggtagatttagttgtcgatatttttgaatgtttaatttattagtaattgaggtttatgatgtgttttagtggggtattatttttttaggtgattaattagttattaagtaataagttgattatatttagttatttttattttggaagggttagaggtttatttttatagggataggtttttattttatgggtgtttttatgttttgtttttagaaatttagttagtattttttcgggtgttgttgatatttttgatttgtaggttaggcggtgtttttagtttattatttgtttgaaggatttatttggttgggaaagttttagtgtttttatggttgtgggttttattaattttattattatttgtattatttagaggttgttagttataaggaatgttggataggttttttataggtaaaatttagtgttagtttggaggaagtattttgagaggtgggtgttattttttaggatacggtgtattgtttgaattagagatgtttttagagtgttgtgtttttaataggaagaatatgtgtgtttagggattaaaagatggaagtaggtttggttttacgtttaattttttagatttatttaatggggtattttgtacgttttattttttaatattgggttgtgtagggtacgaggttttggtttttaaggagggtatttttaaaaggagataaaagatagtttattgaattatatattatggttgttacgagagaagttttgatagtttgtgtttagagattatttggtgaaaagaggattttttttttttttaggtttaggtaatagatttttatttttaggagaaggtatggttatttttatataatgagggcggaagtgtgtgtggaaattagagatttatttgggggttttttggttttttttattttattgtaagtgtgagtagaattatttagtaatttagtttgagatagtttgatttttaaggatttagattcgttagggtagaaggtttgagtaatgttgggtaattttttaaggttttgtttttgtgttttgatatttttagtagtattggtgttgaggttttgtttttaatgggttgtttttaattagtgatagattatattagtgatacgaaagtaggatatttttgggagattagggatttttttgatggttaattgtagtttaaggatttttttatggttttgtttaattttttttagattgtttgtggtttacggtatatttagtaaattttgtttttttttgtttattattggggattatttttgtattttgttgttttttttagggtaatttattttttttgttatattatttgataggtgtgttttttaataaaatgttataattttaattttatgatggaatttgttttttggagtatttggattataaaattatttttatttgtttattagtgattttttatttattttaatgtgtaaaatttttttgtttatttaatttttatttgtattggttttattttgttggtatttgtattatgtttttgagttttttaatgtttattgtttaattattaaatttgggggtagtttgttatatagtaatggataattaatgaagtttttttatatttttattattttatagaagttaattatattttttttatttttttttattttgataatattagttatatatagggtttttagttttttaatatttatttttttttttattttagtttttttttttttttatttttttttttttttttttttttttttttgagatggagttttatttttttgtttaggttaaagtgtagtggtttaattttagtttattgtaagttttgttttttgggtttatgttatttttttgatttagttttttaagtagttgggattataggtatttgttattacgtttagttaatttttttgtatttttagtagagacggggttttattatgttagttaggaaagtttttgttttttgattttatgatttgtttgttttagttttttaaagtgttgggattgtaggtatgagttattatatttggtttttttttttcgtttttttttttttttaatttttttttttttttttttttttttatttttatttaatttattatttttttttttttttgtttttttttttttttttttttttttttttttttttttttttatttttttttttatttttttttttttttttttttttttttatttttttttttttattataaaatttttttaaaatataaaataattttatgtgattgggttgtaagtaagtattttttgaatttatatgttaaaagtataatgttttttatatgagaaataagtaaataataggaagttattaatagaataaaaatgtttgttataattttattattaagacggtgatttttaatataatttttttaatttagtgtttttagaatatattattaatattaagtattatatatttattgtaaaagtttaagtagttataattattttggaaattatattattattatttagtatggttaaagtttatataatgtattatgtaattaatttatttttaattatttattttgggggttttggggtttttttgtttatgtgtataggagatatgtatattaatatttatggtaaaaattggaatcggttatatgtatattaataggaaatcggtgaaattgtggtaaaacgatatgtaagtttttagcgtaaaaatgaatgaatgatagttttttatattatagataatttttatatataatgtgtattatgggaaaatatatgtagtaggaatttgttgtataggaagtttaaaaattagtaaaattaattgaggtttgttttggggagatatatatatatatatatatatatatatatatatatatatatttattgtataaatttttgaaggaatataaaggaatacgtattagaagatttaggatggagttttttgtcgagattagttcggttaggaagattttaatttagtggtgttagaggatttaaagatatatatatagaaatatagaggtgtgaagtgggaaatcgggggttttatagtttttagagttgagagttttaaatagatatttatttatatatttattaatagtaaatcggttattagtgttgtttttataggtattaaattaattaaaagtattttttataggaagtaaagggatgggtcgaattaaaggaataggttgggttagttaattgtagtaggaatatatttttaagatatagatcgtttatgttattgtttgtggtttaagaatgtttttaagcggtttttcgttttgggtaggttaggtgttttttttttttatttttgtaaatttgtaattttttagtttggatattagggttattatgaatatgttacggtgttgtagagattttgtttatggttagttttggggttagtttatggttagattttgggggatttgtttttaacggtttttttttagggggtgattgggtagtagtttagggtagttttataggtttgtgttttatattagtgttgggtattttcgtagatatttgattataattttttaaatagagttttttaaattaaaatatatttgttttttatagaaatgaaaaagaaaagaattttaaagtttattgtaaagatttttaataagaattatttatattggaagaaaattatagagaattgtaaggagttatgtgatagagaggattaggatgttatgaaaatggtattggttataaataggttatttgatttttggttttttggtatttttttagatttttaatgatataatgtttaatttgttgtgtaagataattttattttttaaagatttgatgttatattttattatatattaaattgaaataaatttttatagattggaaatgtatattattgattaaaataaatgaaatatgaaaagagtagggaggaatatttagtgatggaatagtaaatatgaatggaaaatagaataggattgttaaaaagaaaaaaaaatttagaagtatgtaatagtagcgttatttagaattatagtggtgtttaaattatttttattatattttatttaatattataataaaagatgttaagtttattatagaatgtttattaaatagttagtttttgaaaaaaatttgttttttaattagaattaattatttcgggttatagtattaagttaaaattattggtattatgttaataatttttattaaagtaaaataaagttgattgaagtatgagatttatatttttgtaaatgaaaagtaatttgattaggtatttttttttgtatagtaaaagaaattattattaattatagtgaatagatattttatagaatgggagaaaaattttgtagtttatttatttgataaaagtttagtatttagaatttataaagaatttaagtaaatttatatgaaaaaaaaattttattaaaaagtagataaagaatttgaatagatatttttaaagaagatatatatgtggttaataaaaatatgaaaaaaagtttaatatcgttgattattagagaaatgtaaattaaaattataaatgagatattattttatgttagttagaatggtaattattaaaaagttaagaaataatagatgttggcgaggttgtagagaaataggaatgtttttatattgttggtggaaaagtaaatggttaatttattgtggaagatagtgatagtgtggtgattttttagagatttagaattagaaatattatttgatttagtaatcgtattatagggtatatatttaaaggaatataaattattttattataaagatatgtgtatgtttatatttatggtagtattatttataatagtaaatatatggaattaatttaaatgtttattaatgatgaattggataaagaaaatgtggtatatatatattatggaatattatgtagttataaaaaggaatgagattaagttttttgtagggatatggatgaagttggaagttattatttttagtaaatttatataggaacggaaaattaaatattatatgtttttatttataattgggaattgagtaatgagaatatatggatatagggagaggaataatatatattggggtttattggggtagggtggtggtgggaggattattagtaaaaatagttaatgtatgttagggttaatatttaggtgatgagttgataggtgtagtaaattaatatggtatatgtttatttatgtaataaatttgtatattttgtacgtgtattttggaatttaaaaaaaattaaattaaaagataagtttaaagaaaaagataagttgaaagagttaatgaaaaataattagataaaagaagtttttgatttttaaaaatttgaaataatagttataattttgtttttaatatatatttaaaatatttgatattgtttttttttagaggtgtattttaatttttttttttgagtgtggtttggatttaatgaggtatttttgatatggtttggttttgtgtttttatttaaattttattttgaattgttatgcgaattgtaatcgttatttattgggggagggattatatgggaggtgattggataatgggggcggtgtttttatgttgttttcgtgatattgagggaatttttatgagatttgatggttttataaggggtttttttttgttttattttgtattttttttttttgttattatgtgaagaaggatgtgtttgtttttatttttgttatgattgtaagttttttggggtaggttttttagttatgtagaattgtgagttaattaaattttttttttttataaattatttagttttaggtatttttttatagtagtgtgagaatggattaatataatttttaatttatagaataatgttgatataatggtttgtaattttgggtgtagaatttaaaatttattgcggtttttattttttttttttttgtttttgggattatgagttttgggggaagttagttgttgtgttataagtagttttgtaggaaggtttatgtggttgagaattgaggtttttcgggattagataataaagaattaggttttttttaatagttatgtgattgatttatgttttatgtgaatttttagttttagtgaagtttttagatgatgtagtttttggttgataattggattgtaattttgtgagaggttcggagtaagaagtatttagggaaattttttttggatttttgattattggaaattgtggtagatgaggaatatttgttgttttaagttaagttttatataatttgttatgtaatagtaaataaataatatatttttataagagaggatgtattattatatattaaattgtatttgttttaaatgtattattattattattattatttttgagatatggtttcgttttgttatttaggttggagtgtagtggtatgattattatgtattgtagtgtcgattttttgggtttaagggatttattgattttagttttttgagtagttgggattattattatgaattattatgtttggttaattttttaattttttgtatagatgggggttttgtttaggttgattttgattttttggagttaataaatttgtttttttttgttttttatagtgttaggatggtaggtgtgagttattatatttggcgtaaattaattataagatattaaatatgtaatttagttttaaaaggtaaggagaatttttatggttgaagaggatgtattttatgattatttataatgattattttatttgaattttaatttttaattgtgttcgaagtaaatataaaaggaagatttaatttttgttaggttgattttattatgtttttaataattagtttttggttatttattattttttagttatttaattaattttaatgtaggtgttgttgtgaagggagttagtggatataattaagggttttaattagttgattttaggttgggtttattttgtttggattgttttaattaggtgagattttgaaaggattgggttttttttgagtatagagatttatagtgtgagagggatttagtatgaggggttttttttagtatgggttttgaaaatgaaagggttgtgggtcgggtgcggtgttttacgtttgtaattttagtattttgggaggttgaggcgggcggattatgaggttaggagatcgagattattttggttaatatggtgaaattttgtttttattaagaatataaaaaaaaaaaaaaaaaaaaattagttaagtgtagtggcgggtgtttgtagttttagttgtttgggaggttgagataggagaatggcgtgaatttgggagttatagttggtagtgagtcgagattcggttattgtatttaagtttgggttatagagtaagattttatttttaaaaaataaataaataaaataaaaaatgaaggggttgtgtaggaaagaatgttggtgaggattaggaatcgagtatagttttttttgttttttatattgatagttagtaaggaatagggattttagttttataattgttagaaattgtattttgttatttttgtataagtttgaaggagtatttaaaatgaaaatatagtttttggaagtttagaagagagattttatttataattttgtttagatttttgattaaggaattataagtagataaatgggtgttgtttcgttaggtatggtagtgtacgaatgaattgatgaattgatatgtatattagttatataaaataaaaattttttgaatttttttcgtgttttgtattttataattatttgtaatgtaatttaatatatttatattttatttatttagtcgataaaaattaatttagtttttacgataaattagatatttttttatatgtttacgtgtttgatattttagaagttttttaagatcgaggtggagatattggagtgttttaagtggagagatgatatatttcgatttttaggagtaggattattgtgaaaagaatagttacgtaataggttatgggatagtgttagtgttataatttataagtgatagtgtggtggggattaaggggataggagggtttgaaggatgaaaaggacggagagaagggttggagaagtaggaggtgaagaaaaggagtagaggaaagaattcgaaagtagtagaatttttaggtttaaatatattgttttatggattttaatatatttatttatagagtttagtagggtgtttttggtagttggtttttaatattttatgtgggtttgtttaaaaattaattttttaatgttaattaggtttaaaaattattaagtgtttttataaaatatatataatatttagtagtggatattttttaaaaataggtagtgtatgagtattagtgaggggtattgtgattatattgaatagttgtaattttgaggtgaataaagtttgtattgatttttggttgtaattatttggttgtaaagtatatagtgtgttattttgtattgaggagatattttggatttatatagaaatttagagttatggaatgatggtaaatttaaaatatgataagcgggagttataggtatattgtaaaagtgaaatttagaagttttgtgagttttgttgtaacgtttttgggtatatttatatattatggggttaaagttatattttttatcgattagatttttgattatttaggggttattaaggttttgttatttaatgtatttaataaataaataaataaataaattggtttttattttgttttatgtatttaggtataattttttttaataaaaaaaaaaaaaaaaaggaaaataaaaaatagtttttatatttttatttttagagtaagtttattttttgttattaaatttcgtgggtggttttttttttagaagagtttaggtggatagggagtttagtttagggacggagatttttggatgaaaagtgaagggagagggatagggtttatgtcgagggtttttttttggttttttagatagtttttgggttaagatttagggaaatattgagatagagcgtttggtataggaggagcggggttagggcgaagttttagggttaggcgtggtttttagggttttaggtttcgaaggcggtgtatggattggggaggtttcgttttggggattcgttattttcgtagttttttttttttttataatttgcgacgggtttttttttttggatatttacgaagcgggtatagtttttatttttattaggtgtcgggtttttagagaagttaatcggtgtcgtcgcggtttcggttttaaagtttttacgtatttatcgggatttagattttttttagacgtcgaggatggtgtttatggcgtttcgaattttttttttgttgtttttaggggttttggttttgatttagatttgggcgcgtgagtgtagggtttgtagggaaatggtcgggaggagcgaggggttcgttcggcgggggcgtaggatttagggagtcgcgtagggaggagggtcgggcgggttttagttttttttcgtttttaggtttttattttatgaggtatttttatattattatgtttcggttcggtcgcggggagtttcgttttattttcgtcggttacgtggacgatacgtagttcgtgcggttcgatagcgacgacgcgagttcgagagaggagtcgcgggcgtcgtggatggagcgggaggggtcggagtattgggatcggaatatatagatttgtaaggtttaagtacggattgaacgagagaatttgcggatcgcgtttcgttattataattagagcgagggcggtgagtgatttcggttcggggcgtaggttacgatttttttttattttttacggagggtcgggtcgtttcgagtttttgggttcgagatttttttcgaaatcgcgggatttcgagatttttgatttgggagaggtttaggcgtttttattcggttttatttttagtttaggttaaaattttcgcgggttggttcgggtagggcggggttcgggggatcgggttgatcgcgggggcggggttaggtttttatattatgtaggtgatgtatggttgcgacgtggggttcgacgggcgttttttttgcgggtatgaatagtacgtttacgacggtaaggattatatcgttttgaacgaggatttgcgtttttggatcgcggcggatatggtagtttagattattaagcgtaagtgggaggcggttcgtcgggcggagtagcggagagtttatttggagggcgagttcgtggagtggtttcgtagatatttggagaacgggaaggagacgttgtagcgcgcgggtattaggggttatagggcgtttttcggatggtttgtagattttcggggttggttttttataagaaagggagataaatgggattaatattataatatcgttttttttttggttttgagggagaagaatttttttgggtttttagagagtgattttgagggttcgtcgtgttttttgatataattaagggatgaaatttttgaggaaatgaagggaagataatttttggaatattgatgagtggttttttttgacgttggtagtagttttgggtttcgtgatttttttttttaggttttgttttttgttttatatttaatgtgtttgggggtttgagtttagtttttttgagttttttagtttttatttaggttaggattagaagtcgttgttttttttttagggattagaattttttacggaataggagattattttaggtgtttgtgtttaggttgttgtttgggttttgtgtttttttttttattttaggcgttttgtttatttttaagatggttatatgcgtgttggtggagtgttttatgatagatgtaaaatgtttgaattttttgatttttttcgttagatttttttaagatatatatgatttattattttatttttgattatgaggttattttgaggtgttgggttttgggtttttattttgcggagattatattgatttggtagcgggatggggaggattagatttatatacggagttcgtggagattaggtttgtaggggatggaattttttagaagtgggcggttgtggtggtgttttttggagaggagtagagatatatttgttatgtgtagtatgagggtttgttagagttttttattttgagatggggtaaggagggagatgggggtgttatgttttttagggaaagttagagtttttttggagagttttagtagggttagggttttttatttttttttttttttttagagttatttttttagtttattatttttatcgtgggtatcgttgttggtttggttttatttgtagttgtggttattggagttgtggtcgttgttgtaatgtggaggaagaagagtttaggtaaggaaggggtgaggagtgtggtttgagattttttgttttattgagagttttaagttttaggtagaagtgttttgtttggttattgggaagtattatttatatttatgggtttatttagtttgggttttgtgtgttagtatttatttttttgtaaagtatttgttataatgagggatagatttattattttgatgattgtggtgatgggatttgattttagtagttataagttataggggaaggttttcgaggatagattttagaagggcggttggtttaggatttatatttgttttttttatgttttttgatttcgttttgggtttgtagttgtatatttttggaaatttttttggggtttaagatttggaggtttttttaggattttatggttttggtttttttttggtattttataggatattttttttttatagatagaaaaggagggagttatttttaggttgtaagtaagtatgaaggaggttgatttttgaaattttttggatattgtgtttgggagtttatgggggagtttatttattttataattttttttttagttatatttattgtgggatttgattaggttttgtttttattttattttaggcggtaatagtgtttagggttttgatgtgttttttatagcgtgaaaggtgagattttggggggtttgatgtgtggggggtgttgggggggaatagtggatatagttgtgttatggggttttttgaatttgatgttttgagtatgcgatgggttgttaaagtgttatttattattgggatagatatgaatttgtttatgaatattttttttatagtgtgagatagttgttttgtgtgggattgagaggtaagatttgtttatattttttttttgtgatttgaagaattttgattttttgtaaaggtatttgaatgtgtttgtgtttttgtaggtataatgtgtggaggaggggagattaatttatttttatgtttattatgatttttttttttacgttgatttgtgttttttttttaattattttttttgttttagagaggcggggttgagatgtttttattttttttttaattttatgtgtattgagttgtaattttttattttttttttaaaattagaatttgagtaaatatttatttttttaaatttttgttatgagaggttgatgatttaattaaaggagaagatttttaaaatttgagagataaaataaatggaatttatgagaattttttagagtttatgtgttttttgtgttgatttgttgtaggggaggagaatagatggggttgtgtttagtgggtgtttaggttagtatggattttatgtggttattgtttagttgggttatttttgtttttttattttttttggttttttagtagaattttgttttattattatttgtgattatagggatttggatgttatttacggtggtttttgtatataaattttattgtggtattaagagattaatttttagatttgtttagtttttgttttttttttagggtttttttttggattgtagtttttattttgtttttaatttttttaaaggaagtagattttgaaatttgtagagaggaggggttttatagttttttattatagtgaattttttgttggagttttttttttgtttttttatttttttttttgttttgagttgtagtaattttagtgttggttttaatttaaatttatggatttataaagtagagtttaatttagatttatacgtggttggaaaattgtatttataagtttagggttattttttttgaagagaaaaatatggttgtgtgttgtagtgtgtaggagggttggtgtgggaggaggtagggagggagggaggatatataagtatttttggtgagaaaagtattggcggtatcgatgtttatatgagatgatgttgttttttagttgttataaaatagtatttgttttgaggttattttaataaagatattggttttagaatagagaagtgttttatagtgattatttatttaattgatatttgttgtttgttagggatatgattgtttttgcgtttagaaagtattattaaggtgaaaatagaaaaatttttggtgttgtggtatatatgttttagatgttagtttgtttaattcgtagttcgtaggttgaatgtggtttaggatagttttgaatgtgaggagtttttgtttttttgtggcggatttgagatttggagtgagtgtatttattttttttaggattaggagtgaatgttttaggaatttttttttgtagtgatttgtaaaagatagagggtacggttattgtgagaatttagagtagtagttaaaggggtttaatttttatggagttttgggaaaggttagtaaaaggtggtgttttagcgttagaatagatgggtagttagcgagggtattgttttatatttatgatgggaatgtaagaattgaggagtaggagattgagggtgtttgattaaatataaagttatgattttagttttaatttttagattttagttaagttttagatttagaatttatagtggggtttaaggaggttaggaaataaatttggatatattatggtttattgtgggattattgggtttataaatttagttttggttatttttttattttttatatgtataattggttttgatgtattggtaaagggagttatttttatattatatttttagtttggagagtaagggttattattgtgttgaagtttaaagggaattatttaaaattttttttattttagttaagttagaagtaatattgtgttttaggtgggattttaggagggtattgtaggtattgtaggggtggtattgttattagagagttgaaggatggggggtggtgttgggattgtttattatttttatataatttagtagtttgtttttgaagaagtttgataaagaatgaatggaattattttagatttgattaagtaggagttttgattgtagttgttatgttggttggatattattgtttggggagattaataaggttttaggtatatggtaaatagttatgtatttggtgagtgtatttttttttattttatttagaaaatggatatggaatgatttatatttatatgggatttataatatatttattgatagtttgttttagggttattttaattttttaattttttataaatattattttaagagatttggataaattagatattttatagaatattaaattttttcgttttattggtaatattatatagattgggatggatgagtaagaggaggaaagtacgttgaattttttggtaaaacgtgtgtattatagaaggtgaagattaattttatagagttttaagagtggttattgtagtgaagtgttatgggtttagtggttaggggtatgtagggttgttttttttaaagtaaaagataaatttgtattttgtatttttaatagaaggaaggaagtatattatttggtgagtttttttgggttttggtaatattatattttatatttaagtatattgtttggtttattgtttgggtataatataggaagaggttagttttgagtgcggattagataggaaaggatattgtagtagatttaggcggtggtgtattaggttattaatttttagttttttggtgttgggggtgatagcgtggggaaagatgttagatggagttgaattaagtagttgagattaagtgagttgagatttcgtttttatattttagtttgagtaataagagtgaaattttattttaaaaagaaaaaaaaattaaaaggataagtatttttttatattagagataattttttaatatataatatatatgcggtgtgagttttttgtatggggaagttaaaaaaatataggttaaattgtgatttgggtattattgtaaaaatttttagtgataatgttaaggaatagtaaatataagatttaagatataggttttttttaggggataggattggataatagtttagggtggttttataggttttgttttttatgttaggaggggatatttaggtagttagttatttgattataaaattttatttatttatttatttatatattttgagtttcgtttttgttgtttaggttggagtatagtggtatgattttagtttattgtaattttcgttttttaggtttaagggatttttttgttttagttttttgagtagttgggattgtaggtaaatgttattatttttagttaatttttgtatttttagtagagacgggttttattatgttgattaggttggtttggaatttttgattttaggtgatttatttattttagtttattaaattgttgagattataggtatgagttattatttttggtttataaatttttaaagtggtattttttaaaatgtattttgtgtgttatttttgattgattgtttggaaatgaaagagaaaagaaaatgttaaagtttattataagtattttttgcgataattattcgtagtaaaataaagtcgtagttggtcgggtacggtggtttatttttgtgattttagtattttgggaagtcgaggtttgtggattacgagattaggagttcgagattagtttgattaatatggtgaaatttcgtttttattaaaaatataaaaattagttgggcgtgttggtgcgtgtttgtaatttaagttatttagaaggttgatgtaggagaatcgtttgaatttggaaggtagaagttgtagtgagttgagattttgttatcgtattttagtttgggtgatagagttatattttattttaaaataaataaataaataattataaaaaataagttatagttaattttaaggagttatgtgagaggattaggatgttatgaaaaatagttttggttataaataggttatttgatttttggttagttggtaattttttatattttttgatatatagtgtttaatttggtaggtaaggtaatagtattttgtaaagaatttgagaatttgatatgttgtttatattttattatatatataagtgaattaaatttttatagaatagaaaaaaagtattgttgagtaaaataaattaaatgaaaagatataaatgaataattagtgatgaaatagtaataagaatggaaaatacgaaagagttgtttttaaagtaatattagaagtataaaataatagtgttttttagaattatattggagtttaaattatttttattatatttaattaaaaattatagtgaaagatgttaaattgattataggatgtttattgaatagttagttattgaaaaattttgtttttagattgaatttaattatttttatttattatattaaattaaattattgttatgatgttaagttagttgtatagataaagatgtgagatttatatttttttaattgtaaagtattttgattaggtaaatatttttgtagatgtttgagttagaaaattgttattttgggtattttttttttttttttttttttttttgtttttaagtatttgtttaataaagtatattttgtatcgtttttaatttatttaattttgagtggatatagtatatgttttagagagtacggggttgcgggtaaggttatagattaatagtattttaaggtagaagaattttttttagtatagaataaaatggagttttttatgtttgtttttttttatatagatatagtaataatttgatttttttgttttttttttatattttttttttttttattcgataaaatcgttatcgttattatggtttttttttaatgagttgttgggtatattttttagacggggtggcggtcgggtagaggggttttttattttttagacggggtggtcgggtagaggcgttttttattttttggacgaggtggttggtcgggcgggggttgttttttattttttttttggacggggtggttgtcgggtagagatattttttattttttagacggggtggttgttgggcggaggggttttttattttttagacggggcggtcggggagagacgttttttattttttagacggggtggttgttgggcggaggggttttttatattttagatagggcggcggggtagaggcgttttttatattttagatgatgggcggtcgggtagagacgttttttattttttagatcggatggcggtcgggtagaggttgcgattttggtattttgggaggttaaggtaggtagttgggaggtagaggttgtagcgagtcgagattacgttattgtattttagtttgggtaatattgagtattgagtgagagagatttcgtttgtaatttcggtattttaggaggttaaggttggtagattatttttagttaggagttggagattagtttggttaatatagtgaaatttcgtttttattaaaaaaatacgaaaattagttaggtatggtggtgcgcgtttgtaattttaggtattttgtagattttaaattatttaacgttttagatattaattttttaaggaataggagattattttaggtgtttgtggttaggaggtgtttgggttttgtgtttttttttttattttagatgttttatttatttttaggatggttatatgggtgttgttggagtgttttatgaggaatgtaaagtgttttaatttttttatttttttttttagaattttagaatatatgtgtgatttattattttatttcggattatgaggtcgttttgaggtgttgggtttcgggtttttattatgtggaaattatagtgatttaattgtgggatggggaggattaaatttaggacgtagagtttgtggggattagatttgtagggtatagaattttttagaagtgggtagttgtgatgttgttttttagagataagtagagatatatatgttatgtgtagtaggaggtattgttagagttttttatattgagatgggttaaggagatgaatgaggggttatgtttttttttagggaaagtaggagtttttttggaggtttttagtagggttagggttgaggtttgggggttaggattttttacgtttttttttttttttagggttatttttttagtttatattttttattatgggtatcgttatcgttttggttgttttaggtgttgtggttattgttgtgatgtggaagaataagattttaggtaggaaaggggtgagttttaagatttttttttttattcgtggattttaagttttagatggaagttggtttattttttgtttagttgtgagatattatttttatatatatttattttgtttagatgttttgttaatttttatttttttgtaaagtatttgtgaaattgaaggataaatttattattttgattgtgattatgggaatttgatttttagtagttataagttaggagaatgtttttgttgaggatagatgttaaaaggatatttggtttagttttaatatatttttttttttcgggttttttgattttgatttgggtttgtagttatagttttggaaatttttttaggattttatggttttgttttttttttggttttttatagtttgttttttttttttatatggaaaaggagttagttatgtttaggttttaagtaagtgtggtaggggtgggagagtgatttttgagatttttggaatagtgtagataggagtttatgggggaggttattattttataattttttttttagttatattatttgtgggttttgattagattttgtttttgttttattttaaataggaatagtatttagggttttgatgtgttttttaagttttgtaaaagtgatattttagagggtttgaagtgaaggaggagttggggtagatgggatataattaggttttagagagtttttgatttggaattttttaatgtgtggtgggttgtttagtgttattatttattatgattgatttgaatttgtttacgattattttttttttaagattgttttgtgagggattgagatgtaagatttgtttatggttttattttgagattttaagggtttttgttttttttttttgttaaggtatttgaatgtgtttatgtttttggtaatatgtgagaagtggagagattagtttatttttatgtttattatgatttttgatattgtttggatttgtgtttttatttaaattttatgtttatttgtaatttttaatgttggaggtggtgtttggtgggacgtgattggtttatgaggatggatgatttatgaatggtttagaattattttttttatgttgtttttgtgatagtttttggaggtattgtgttatttttttagggatttgtggaattttaaatttgagagtgatgattaagggtatttgatggaagaaattttttagtagtatagaatttaggatttggtttggttgtttgtaatagtttatgtgtatatgtgtgagtaaagaaatgatttgaaattggaattgatatttaaatggggaaatttaatatttaggaaaatttttagcggagttgtagtaataggatttttgttaggattattaaatggtagagttattggttatgtgtaattttagtttggaaaagttataggtatttaatttttttttatgatagtagttatatgggttatgtttagtaaagttataaatgtggagttgtaaatggtattaggagtttagtagttgtattagttattgtgttttggatttaaaatatagagttaaaggagatttttttagatttttaagttttaatgtttgttatgatgagttttaattttatgaggaaattgtatttattttttttggtttatttatatattttttggaatggaaatgtataagaaatgttttttttattgttttattaatattttagatgtaaataatattttttaaaaaattttataggtttaaagttataagaatttattttgcgttttagatgagattttagaattttgagttgatgttggaataatttaatatatttgggataattgggagtagattattatattttgtaatgtgagaagaatatgatttttggttggttagggaggggatgtaatgatataaatatttattttttgatattttatgttaaaatttaacgtttattgtgggatttggggtttaatggttattatttgggttatggtgattaattttttatgaatcgagagatattgttttttttcgggaatgaatgaattgttgttttattattttttaagagagttagttgttaaaaagattttggtaattttttattttttgtgtttttttgttattatgtgatttttgtatatattagtttttttttgttttttgttatgagtggaagtagtttgaggtttttattaaatgcgtaaatatttttagatattagaattttgagttatatgaatttcgtttatataaattagttagttttagatatttttttatagtaatataaaatggaaaaagataattttcgtattataggtatgtgtttttggtagttagttatcgtttttaagatatttaggatttatttagttaagagtttttttattagtattttaaagatatttttattatttaagagagtttaaggtttttaggagaaattagggataaagattaaatgtttttgtgataatttagattgtttatttttttttgattatatattttttataggaaaaaggattgtaatagtaaagaggtattggtatattattagagttttatttatttatttaaaattaggttagtttattatttttttgtatgaatatgttttttagaatgaaattatttagttttgttgataatatttaattttattaggttttaaaaataaggatggttttagggatatatagttttatttttttaggtatttcgtataattgatttaagtgataatatttttttttgtttatattatttttgaggagttaagttaatattgaattttttttattatataattttttgatttatttatttatttttagttattatttttttttttgtttttttatattagttgtttttaggtttgggagtgatattaggtttgtttgttgggttggtttagattgtaggtagtaatagtattttagtatgtttttttttagtttagttttgattatagagggtaggttatataggtaaggaattagtgggggttattagattattaggttatataattttatttattgttaattttaattttttagatgaaatgaatatttgagaatttttatataaaggtgtaaaaatatagttatggtttttcgtttagggataatttttgtttttggtatttttatttatatttttatttttggtattatggtataatatatgaaaaaataaatttgaggtgaagtgtagtttttattttagtatttttttttttttagaagaattgtatgtatcgtcgtaatagtatcgttttgatttattaggtaaaagagaggatgttatttagtggagttatttttgtagttttatttatgttgatagcgagtatatttatgaagatataaaagttagttttttatgtttatattgtttaataattagattggtagtttttagataaataatgttttaattgattattttaattttttattaaatttttttttgaggaggatatgtttttttgtattgttggtcgtttgaggttgttaagtgtgtttttttgtgtaaagtagtgtgattcggtagtttaaattggtgtaatttttttttttttggtttttgtatagtttttgaagtattgatatttatttttggttgagtatagtttaatttagagttagtgatttttttgttaagatttattggtagtttttttggggttgttggtattattttggtttgttaggtattatgattaaagtttttttattagagaatttgttatatttttatttgttgtttttgtttgtttttttgattaatagtgaaaaaagagattatgagaaataagataaattattaaaattgtgaataaaagagattattattaatgatttttaggaagttaaaaaatattataagtgaatattttgaaaaatttgaagttaataagttagattatttagataaaaaggattaattcgtgtagagatagaaattgttaaaattgatttaaattaattggaaaatttgaagagaattgtgaattaagttagaaattgaaaaatttttttaaaaagaaatgttaaagtttagatatttttattggtgaattttattaaatattttgaaagtttttttagataagaagagaggagggaagattttttagtttatttatagaattggtattatttttatattaaagttatagtaagatttataggaaaagagtgttatatattagtgttattaataaatataaatgaaaatatttttaataaatattggtagataatataaagttatataaaaacggattatattttatgattaatgggatttattttaggaatatatggttggattaatatttgaaaattaatttatggaatgtattgtattaatggaaaaaaagatataattattttaaaagatgtagaagaaatagttgataaaaatgttaatattatttatgtttataagttttaataaaataggaatggaggagattttttttattttgataaagggtatttataaaaaatttatagttaaaattaaatttaatgaagaaagattgaagattgaatgttttttttttaagatggggattaatgtaaggatgtttaattttattatttttatttaatattatattggagattgtagttagtgtaataaggtagaaaattaaaaattaaaggtatttagataaaaaggaaaatatataattttatttatagataatatgattttgtttgtagaatttataagtagataaaaattggttagtattaataaatgaatttagaagggtttataggatattaaattaatataaaaattaattattaatatatttttttatagaagtaatgaaaattttaatttttttattatagtagttattagaagagcgaaataggaataaatttaggaagatagtagtgtttgtttattgaaaataaaaaaatattttttagagaaattaaaggtttaaataaatggagagatgcgagttggaaagttcgataatattgttaagatggtaatttttttttagtagatttataggtttaatataatttttattaaaattttagtagggattttatagaaaattgataaaataggtcgggcgcggtggtttatgtcggtaattttagtattttgggaggttgaggtaggcggattatgaggttaggagatttagattattttggttaatacggtgaaattttatttttattaaaaatataaaaaattagtcgggcgtggtggtgggtttttcgggaggttgaggtagaaaaatggtatgaattcggtaggcggaggttgtagtgagcggagattatgttattgtattttagtttgggtgatagagtgagatttcgttttaaaaaaaaaaaaaaaaagaaaaaaagaaaagaaaattgataaaataattttaaaaatgtatattaaaatgtagaggatgtagaagggttaatataaatttgaaaaaaaaaatggaatgttatatgaaattataataatttagatagtgtgaaattgagagatatagagattaatgaatagaagtgagaatttagaaagatatttttattttttttgttaattgatttttaatgaagttgtataggtaatataatgttatatttaatattatataaaatattagtttaaataaattagaaatttaaatagttaaaatttatgagttaaaattataaaatttttaaaagaaaatataggagaaaatttttattattttgggtagttaggtaaaggatttttagataaaatattaaaagtatgatttataaataaaaaaaaaagagagagagaaattgggtttagttaaaatttaaaatttgagtgttttaaaagatattgagagaatgagaagataagttatagatagggagaaaatattttataatttattataaattatatttgtgttgaagaatatgtttttagaataatgtggtaagtttttaaatttaatgtgtaagaagatgagtaatttaattgaaaatgagtaaaatatataaatatgtttaattgatatttataaaagtataaatataatttaatgaaggaaggagagtttttttaataaatggtgttggagtaattggataattatagtggaaaaaaaataggttgagtttaaattttacgttttatataaaaaaaaaaaatttaaaatgaattataggttttaatgtaaaatatatagttaaaattataaatattgagttaggtgtggtgttataggtttgtatttttatttatttaggagattgaggtgggaggattttttgagtttaggagtttaaggttagtttaggtaagatttttttttaaataaataataaatatattaaaaaattaaaattataaattttttaataaaaagttattagaattaagattagataaagagtttttatatataatattaaaagtatgatttgtaaaagaaaaagttattaaattggattttattaaaattaaaattgttgttttgtgagagatttatgaagagtataaaaagataagttatagaatgagagaagatatttgtaaattatatatttaataaagatttgtatttataatatatgaagaaatgtaaaaatttaatagtaaaaatgaaatttaaataaataataggtaatgagtaagatatgaatagacgttttattgaagaggataaatattaggttaataagtagatgaaaagatatttaatattattatttagtaggaaaatataaattaaaattgtagtgatgagaatggttgaaatataaaataaaggtagtaatagatgttggtaaggttatagagaaattggattatttatattgttggtaggaatggattttaaaatggtatagttattttggaaatggatattgtagttttttttaaattgaatatgtaatttattatatgattagaaattgtttttttaggtatttattttaaataagggaaaattttatgtttatgaaaaatttgtatataaatatttttgtagttttatttataatatttttggaagtaattatttataattatttttataaattggaaataatgtaattgttttttagtgggtgaaggagatttgttggttgaatttataattgagtttatataagtgtttttttttaagattattattttgtttttttttgtatattttttatttttttataaagaatattaaagatatgtatttaaggattaaaatttaatgaatataaatattttattgttttattaaaggtatttttaaatgggattgtagtttggagttattgttttggttttgttaaggtgttgggtgtgttatcgattttggtatttgtagtattaatggaaaagttaatataatgaaataggtaaatggtattttggtattattgtgaaaataggtttttttttaggattttttgaaggtagtttagggggttatatttttaaaatggtagagattaattatagtttttagtgagatttaatttttagtttatttagatttagtattttttttcgttttttttttttttttatttttttaatttataattgtatatatttttaaatgtgtaaagaagttgaaagaatagtgtagtaaaatttaagttattattttgatatatttgattaatatttttttatatgtatgaaagtagcgtgtggaatgatagataatagagatttagaagggtaagagtggttggtagtgggtgtatcgtagaggagttttttgttggggttaatgtatttgtttttagtggtggatgtattgaaggttttgattttattataatttaatatagtaatgtagtaaaattgtatttgtgttttatgaatatatacgaatttaaaaatttaaaaataaaataatatttttttttgtagatataggtagatatgtttgtatagtatgtgtgtgaatgtgtgtgtatgtgtgtgtagagaggtagtaggaatgaagagattaagattttgtgattgagttattttaaagtaataaatataaaatacgtatggataaatgtttatgtgataataaatttgaatataaatatgaaagaatatgtttataaatatatttttggttagataatttatgaaagaattttttattttagtttttttattggttattttgcgaatataggtaggtagggaataggatttaattaggtttttttatttttttgtttttaggtaggttttgtatttatttttgttgtatagagggtttttatttttgttttggtcggttttataggtgtttttttaattttttttgttattattgttttatttgggtggagttgaggttgttttgattaagaatagtattatttatttgtgtgttttaagattaggaagttaggaggaattacgtaatagagttaataattattttatttttttagttagtttgaattgatggcgggagatgttgatgtttgtttatttttatttttcgtttatttatttttcgttaatttagtttaaattttttttagtttgaattgatggcgggagatgttgatgtttgtttatatttattttttgtttatttattttttattaatttaatttaaattttttttagtttgaattgatggtgggagatgttgatgtttgtttatttttatttttcgtttatttattttttattaatttaatttaatttttttagtagttattttatttaggaagtagattgatttttgttttttataattaggaaattttaaagtattttttattatttttttgatattattttttagttttatattattatatgtgggttttaattttgaaggtaggtgtttttttatagggttaatttttgaatattggttttagatgtttttttatttttttttagtttttttagtattgttgtgaatttgttttttattgagaattggcggggcgatgtgggggaggaggggaaattttttggtgttgtgttaaagtattaagatagattttttttttttttttgaattttatattttatttttttttagatatttgaaataaaacgtagattagaaatgtttatttaagagttaatataatttttttttttagataagttttttttatttttagggtttagttatgattgtgggtgattaaataattatttataaaggatagaattcgttttaatgttagtttatgaatttatattttgttatttgtagaggtggaaaaaggtatttaaattttcgattttatagttttttttgtttttaattttttatatatatttggatatttggagagtgtggagggtatttagggtgtagggtggtagtggaggttttgggaaaattggttaggaagttaagatatgtattttaggtgattaaatttttttattgttttgtatttgttggagaatgattttaaaagataagattaatttgttgattattaatttatttggttgagttatggatatggagtagatgagtattgtttttatttatgatatgtatgaggattttgagatttatttgtagtagttaagttttatatttagagggatatttatttttttatttttttattttttgtatttttttatattttatatttttatttttttttttgagagttttttttttttgggttttttagttttattttattttttatttttttttaggtggtatagggtttgattattatatttgtgttaggtgataataatgttaggatttttagtatgggtagtatcgttttgaggttagtgatagtgagttgtttgatgagatagatattttttttatagtgagtgttgatgttatgaagttttttagttttttttagttttttaatatgtttgtttttaattttgttatgggtatttgatgtataatggatatttggttgttttatgtattttggtttttgatgtcgtgttgggatgtttttttgatcgttatgtggggtatttgtttttttttattatattatatttttttttttatttttaagtttgttttttgaatttatatagtatattagtatttgtatgtgtgtcgtgtgtttttgttttatttttttttttttatgttttatttttattaggttatattttttttttagttgaatagatatagtaggggattagtttattttggtatgtgattacgttttaggaggagattgtaggttgggggtgaaggagattttattgattttatttttgatattttttttttttattttttggtttttgttttttgttttagtattatttttgaatttttatttttgattgttagaatttttaatataattaaaaatgaaatataagtgtatttgtattatgtgtgggtgttttttttttttattttatttggggtgaggttattttagggtatggtttagggtaaatttttgtaaggttttggtgttttgttgtgaggttaaagagggatgggattaagattgtagagttttggtttttttattatttgttaattgttagttttttgtggggttttttttgttttttttggtttgggagatgttggggtgtttttgattttggggtttttgggggtggtgtatattagttttaggtatggagggtgttgtgggtattgttgggaagtttgggtgtttttttttaggttttttttttttaggtttttttagtgtttttttatttgtttttttagtttttggattttgagtattagggtttgggtttttatcgatttttttttttttaggagggtttggtttagttttagttgttgtgtaagtaattttttagtttgggttagtttagttgtgtggggggtttagggttttggttagagggagtggaggagggagtattagttagggtagaggggttgaggtttttggaatttgtgttgtaagattttatggtaagtgaggaattcgatttcgttttttttttttttagtttattagtttaagtttatttgtagtgagaattttagggagtaatttgttttgggtataggtttttggagggtagatatagatttttggtttaggggttatatttggatgttttgaatgaggatatggggttatcggaaagagataattagatgtttgtttttattaataaatgattaattgttagatgagggggaatttttgtttaaggattttggattgtgttgttttgggtagagggagggttggagagagggagttttgagggttgggttggggtgggggtggaaggagttgagagttggaaataggtaaaaagttgtagaggtgagggtaatgtagggtgggattgagagaatttttttcgattattgtattgatttttttattttttttattcgagtatttggagttatatagcgggtggttttatttttttattgttttagaagttgttttgtttttttatatttgttttggagttttgggagtagtatgtttatgagttttggggtgttagggattaggagggtaggaggaggtgaagaaaatagtatcgagagagttaggggagtgggaggattgtcgtaggtgaggtaaggagttgtttgagtcgtttagtagtttttaggaggttttttttaggtttgtttttattttagtgtttggttttatttaggtttttattttcgttttgtttttaagttggttttagataggattttaaataatttttgtttttaatgtgaaaaatgtttttgtcgttttaggtagaatttgttttagagtattggtatagtttttcgtcggtcgtgtgtttgatttttttggtattgtgtttttttttatttatttttttgtaaggaaggaattatattattggttgggtgaggtaattggtttagatgggtttattgagtatttattcgttgggagagtgtttgtcggggttagttatggttaagatgtgtttaaggttttatagttagttggtggaaaggtttggagggtttatatttaggtttatttaatttgaaaatttatattgattttatttaagtattgattttttttttataatttatgtcgtaaattttattgttttattttaagaagttgttataagagtttttagtaattatttttttgattagttagtaattattaatattgaggtaagatcgtgttttagtaaaaagattaagattagttgaagttttagatgatttttagtatttttgagtaatagagtaattttaaattaaggtatatatatagtttttttatatataatgttattatatatttaataggttatagtagagtgtgaatataatttttttatgtattggaaaaataaaaatttgtgtgatttgtttgttgttatggtttgaaattaaatttgtagtgtttttgaggtacgtttgtagtttttttttttttttttttgttggttcggaatgattttgttttttgtttttgtttagttttgtatgttgtaagggtttgttttttttggtaggtttgggaattttgtatttttgtaattttggtttttggtatacgatattggtattaagttttgttggattagtgagttttttttttatatattttttgaattagaattaaagttttgtgtatgtatcgtgtatgtgtgagttaatgataagatgttgtttttttgtaggtgttttgaaggaatgttttgttgtgattggaggatatagttacgggttttttaggtagaagtggtttagaagggagtggatggtttcggttttgattatttggggataagaaggttttgagataaaaatttatgttttggaaaataaaattgtttgagattgaaaagtggttaattaattcgttatttgggatattattgtatattgggatggaagatggtttttgttatggtgtagggttttggatttagataaagaggtttttttatggtttagtgtttttgaagtatttttaaatgaggttaaagattttatgtttatgattagttgatttgtttttatttagtggaaaaaaaatttagaatttttgtaaaattttaggagagagggattttttttttgttttttagtgttacggttatgtatgatttatatttgaattgtaatgtgtatatagtttaaggatttaattattagaatataagaggtttaaattattgttgttatagatatgtaaaattatatggtataaggttaaataatttataattaattaatagtgaagataaattaattatattgtaaatttaaaataagattagtagttttttagaaaaaaaaataaaatatatgggaggttgtaaaggtaatttaaatgatattttaataaaaattttttatgaaaatgatattttaattatttgagtttttgttttaagttatgaattttagaatggattaatatttaataatttatagtagggaggtttaagttataaagaaaggtgttagggtagatttgaaatttggaatgaatacgtttttttttttagggtaatgagtaaattttttaagattcgttttattttagatagattatttatttataaggaggttaaaaataagttttatatagtattgagatataattattttattgtttttatttttacggatagagtttaggtgagagttatttttgtttttttttttttattttttatagttttagtattattgtttgcgtcgagtttattaggatttagtttattatgttttttttttgtttgtgttagtgatattgggttttttatatattttgtatttatatttttataaggttttgaatattattattttgtttttttaattttttgaattatagaaatttttttagtgtattttttggaattttagttaatgattagtaaaatttttatatttttttttaggatgtttttgtattttatagttttagtagtaatttggtttttttgaggatatgattttttttaaagtttttttatataggggagttttttttatggatttgtatttttgggtttagaggtgaggtggggttttttttttttattgtggtttttagaattttttgttttttttttttttaaaatttttaagttgttattagattagatttttattttttttattgtagttattttttgtgggtttttggtttttttttttaattttgatttttgtagtttttggtttattgttattttttttagtagtttttttgattgttgatgattttaatatgtggtgggttgagtaatggtttcgaaagaggtttagttttagtttttggaatttgtgaataggttgtattatatggtaaaagggattttatttatgtaatgatgattaaggattttaaaatagggagatttttttggataatttgtgtggttttaattaaattaaatgagttattaaaagtagagaatttgttttggttggagttagattttgtagaggaggaaggtagaggagatatagaagaggggaggttagacgttttaagtaggaggattggatgtgttttaggtattatgtgtgagtagttgaaagaagattttaggagttaagggtggtttttaataaggaagtggaaatttttgttttatgtgtaagaaagtgaatttagataagaatttgaatgagtttggaagtggatttttttttagagtttttaggaaggaatatagatttgtttatattttgattttagttttataagattgtgcggatttgtaatttataggattgtaatatgataattaggtgttgtttaaagttatttggtttgtggtaatttttatggtagtaatagatatttatatagtagagaagatgtttttgttttttggatttttagattttggaattttttttttttatgatttttttttttttttgtttgaattttatgtttttgttattttttaggttttattatgtttaaggattttagtttttttatatttttaattttatattttttattttttggttatttttttatttattttatgtaaggtggttataggttttgaggatatagattttattattttattatatgttgtgaggtaatattagtgattatttattgtatatgtgtttgtattttaggtttgaagtttattttttagtatattaattttaataatttttcgatttttattttgggaatattaatttagtgattttgttatttatttattgttttttatcgttggtgttttttttaattttatgatttaaattatatggggagtttttattagggttagtaattattttttttttgtatggtttatttttagtttttttttggtttaggtgatttttatatattttttttttgtgtttatatatttaattttttttttttatttttattttagttgataattttggtttttattttattgagaaaattgaatatattagaagatagattttattattatttgtttatgtatttgtagttgtaatatatgttaggtgttttattatgtcggggattgttgtgggtaaattattttgtttttagttagagttaattttttttttggtgttttaaatattattttttattatttatttaaaggtgttagtttattaattaatatttttttttttttttattattaattttttttttttttttttattggattattgtggtagttatgagaatgtatattttagttttttagttagagtaagtagaattgatagtggttttaatttttgaattttgaaatttattgttatatttgttttgagattatatttgttttttgtttttttttgttaatgattgaggaaagtagggtagaaattaaggtaggaatattttttttttgaaggttgattgaagttttagggttttttgttacgtttattgaatttttgttagtttgtatagggtttaggatgtttttagttgatttttttgtattgtttattttattggggtttagagttgttttgtggtttgatgatatttttagtatttttcgtttgtgttttgaattttttttataattattttttttaataaatttttgtatattgaatattgtattggggtttgttttttaggggattttaattaatataagtagtatgaagggtgatttatgaaaataggtaaaaatgagaatttgaaaaaagtttgtttattgtttggtaggttaagaggatgttattagggttgtgggagatatagaaattttatagtataggatgtagttgagttgttatgggttttattcgtgttgagttgagaggatgttttggttaggggaagttatggtaggtggggtgatagaatgttttgtataataatgacggggttagggggaaatttataaagatagtggagttggttggttgttgtttagttgtaatgatgttttatgaaagtattatgagaatttgtagattgttaatagttgttattggttatatgtgatagtttttgtagtgttttatgtagaggtttttattttttgtagcgaaagggtagatatcgtggaatggtagttgaagatattattatgagggttatagtgttttagagaggtttgttatttagttaaggtaggtttgttataggaaagttaggattttggtggggaaatttgagattttgtaaataggaatagggttattcgatgggtgttttttaggattttttgggtatgtataggaggtttatttttttttagtaatggtttttattttttatgttggaagatgttatagaagttttatttttatgatatagtaggaattttattgaagagttttgtaggaattagttggtacgtttttataggaggttgaggagtatttttgggattggaatttgagggtgtttgattaaggaattagaattttaatttggaagaataaaaattttttggtttggaggtatttttttaaggtatgggtttattaaatattttaggattttgataagcggggggttaaatttatcgttggggtgaatttatatagattagaaaaaatgatgtttaatttttaataaggtagacgtgatttagttgttttggaatttgtataggatggaataataaggttgagggaagtgggtatggtgaaggtttattagtattatgttttataagatagtttaaaggaaatattttttattagagttttagaaacgtgatggtgagagggatttgtattattaagaagtgtcggggtgttgttttttgtaggttggatgtgatggtagtaaagatgatttagagttatatttattaataattttggggagagtgtggttttgaagatataaagattaaatggtggtagtgatttgaaaaagttagagggtagagttattatggtaaattaaaaggagtagttaataggatttaagttgtagggaatgtggggaaggatagtagagggtgttgttttaggattaggataggaagttaataagggcgttgtttgatatttatgataagaaagtaagaattgagaagtaggagggtgaaggtgtttgatttaatataaagttatgattttatttttaatgtttagattttagttaaagtttagatttagattttagtgatagaggaggagtttatatttttaggaggaatattttgtaatttcgtggaagtaaatgttggtataatttttttagttttttagtaaaggaatttatagttatttatttaggagattgtatattggcgaaaggaaagatgtagaattggttagattattgatattgagtgagagttgatattgatgtttagatgtttatagtattattatgttttttattatagtggggtttacggaggttagggagtaaatttggatatattatagtttataatggaattattggttttatagatttagttttggttattttttaattttttgagtatataattgatattgatgtattgttaagtggagttatttttatattgggtttttagtttgtggagttaggatttttattgtgttgaaagttaaagggaaatttttgacgttgtttatattttggtaaaaaaaaaaaaaaaaaattatagtgtgttttagggtgtgttttgaggaagatattgaaagtaatgtgggagttatattattattagagagttgaaggatgtgggatggtgttggggttgtttattgtttttatataatttagtaatttgtttttgaggaattttgatgaggattaaagaatgaatgagattattttaggtttggttaagtaggaattataattgtagtttttatgttgtttggatattattgtagagtagaataataaagtttcgggtatatagcgtgtagttatggatttggtgagtgtatttttttttattttaattagaaaggggatatggagcgatttatatttatgtgggatttataatatatttatttatagtttttttttagggttattgtaatttttttgttttatatagtatggtttaaagataatattagatatattggatattttataggatattaaattagtttattttattgataattttatgttgattgcggtgaatgagtagtaggtagaaagtgtattggagttattggtaaaatatacgtattttagtatgtgaagataaattttatagagttttaagagtggttattgaagtgaagttttatgggttaataagtgttaagtgtttaggggaatgtaggtgtgttttttttaaggtaaaagataaattgttttattttgtatttttattagaaggaaggaagtatattgtttgatgagtttttttgagttttgataatattatattttatatttaggtacgtgttttggtaaatattttaggtgatataggaggaggttagttttaagtagggtttatataggaaaggattttgtagtagatttaggttatggtgcgagtagttagcgttttttagattttttggggttggtggtgttagtggtggggaaagatgtaggatggagttgaattaagtattagtggaagagttatagtgaagggtttgggattttggagtaagatcgtattatttatagtagagatatatgttttttgttagaagtaatttttagtgttttttgttttgatttgatagaaagtttgattataggatattaggtaattatgtggttttaagtgtttttgtgatttataatattataaattgtataagtttaatagtatttattatgaagtgaaaatggtttatttgggttgagtttgaattttacgtttatatttatagaaaatatttaagtttgaagtggtattgaataattaaatagataaatggaagttagttagtttttattatgggttagtttaggtttggtaggatgagtgtatgaatggagtaattatagtggtaggtatgagggttagtagtattgatttttttttattaaggtagatttagttgttgttatttttgaatgtttaatttattagtattttaggtttatgatatgttttagtggggtattatttttttaggtgattagttattaattaagaagttgattatatttatttatttttattttggaaggattagaggtttatttttatagggttaggtatttattttaggggggtttttttgttttgtttttagatatagttagtattattttttggatgttgttgatatttttggtttgtaggttaggttgtgtttttagtttattatttgtttgaaggatttatttggtaagggaaagatttagtgtttttatggttgttttttttattaattttattattagttattttttttaggggttgttagttataaggaatgttttatatgtagttttatatttgttattgtggttgttttatttatgtgtttattttattatgtatgggttgatttatagtgaaggttggttaatttttatttgtttgtttcgttgtttaatgatattttagatttggttgttttttgtgggtgttaatatgggatttaagtttaatttaggtggattatttttattttatgatgaatgttgtttggtttgtgtaatttatgattttttgggttatataggtatttggaattatatagttgtttggagtttcgtgattttttataggtataattaagtgttagtttggaggaaatattttgagggttgtatgttattttttaggatatggtgcgttgtttaaattagagatgtttttatagttttgtgttcgtaagaggaagaatatgtgggtttagaaattaaacggtggaagtaagtatggttttatgtttaatgttttagatttacgtaatggggtatttgatatgttttattttagaatattgggttgtgtagggtacgaggttttggtttgtaaaggagggtatttttaaaagtagataaaagatagtttattgaattatatattaagtgtgttattagagaagtgtggatagtatatgtttagagattatttggtgagaagaggagtttttttttttttaggtttaggtaatagatttttatttttaggaggaggtatggttatttttatataataaaggtagaagtgtggaaattagagatttatttgggggttttttgtttttttttattttattgtaagtgtgagtagaattatttagtaatttagtttgagaggatttgatttttaagggtttagatttattagggtagaaggtttgagttatatttttgggtaattttttaaggtcgtgtttttgtgttttgatatttttagtggtattggtgttgaggttttgttttttatggattatttttaattagtgatgggttatattagtgatattaaggtaggatatttttggaagataggggatttttttgatggttagttgtggttggaggatttttttatggttttgtttaattttttttagattgtttgtggtttaggatatgttaagtaatttttttttttttttttttattattgggggttatatttgtattttattttattgttttttttagggtaatttattttttttattatatcgtttgataggtgtgttttttaataaaatgttgtaattttaattttatgatggtatttgttttttggagtatttggattataaaattattttcgtttgtatattagtgattttttatttattttaacgtgtaaaatttttttgtttatttaattttttttatttgtattggttttattttgttggtatttgtattatgtttttgagtttattaatgtttgttgttgtaagttattaaatttgggggtagtgttttatatagtaatagataattaatgtagtttttttatattttcgttattttatagaggttaattacgtttattttatttttttttattttgataatattagttatatagagggtttttagtttttaacgtttatttttttttttattttagtttttttttttttttgttttttttttttttttttttttttgtttttttttttttttttatttttattttattttttattttttttttttttttttttttttcgttttttttttttttttttttttttttttttttttttttttattttttttttaatttttttttttttttttttttttttttatttttttttttttattatgaaatttttttaatatattaaataatttttacgtgattgtgttattagtaagtattttttgaatttatatgttaaaagtataatattatggtatataagaaataagtaaataataggaagttattaatagagtttgaataaaaatgtttgttataattttgtagttaagatagtggtttttaatttaatttttttaattaggtgtttttagaatatatgagtttaagttgatataattattttggaaattatattattattatttagtatggttaaagtttatataatatatcgtttaatttttttatttttaattatatattttagcgggtttttttgtttatgtgtttaggagataggtatattgatgtttatggtaaaaattggaattagttatatatatattaataggaaatatatattaataggaaattgtggtataaaatgtaaatttttagtagtgaaaatgaatgaatgatagttttttatattatagataatttttgtacgtaatgtgtattatgggaaaataaacgtagtaggaatttgttgtataggaagtttaaaaattagtaaaagtaaataatttttttttggatatatatatgtatatatatatatatatatttattgtgtaaatttttaaagaaatataaaggaataaggattataagatttaggatggagtttttttttttgggggatgtgattgggtagtagtttaggggagttttataggtttgtgttttatattagtgttgggtatttttttagttatatgattgtaatttgttaaatagagtttttaaattaaaatatatttggtatttataaaaatgaaaggaaaagaatattaaagtttattgtaaggatttttaataagaattatttatattgaaagaaaattatagagaaatgtaagtagttatgtgatagagaggattaggatgtgatgaaaatggttttggttaataatagtttatttgatttttagtttattggtatttttttggatttttaagtatataatgtttaatttgatgtgtaaggtaatttttttttgtaaaggatttggtgttatattttattatatatataattgaattaaatttttatagaaatggaaatatatattattgattaaaataaatgaaataagaaaagagtagaaaggaataattagtgatggaatagtaaatatgaatggaaagtaaaataagatagttaaaaaaaaaaaaaagaaagttttagaagtatataatagtagtgttatttagaattgtagtagtgtttaaattatttttattatattttatgtaatattatatttaaaaatgttaagtttataatagaatgtttttgagttatttttggaaaaaatttgatttttaattcgagttaagtattttgggttattgtattaaattaaagttattggtattatgttaagttagatgtgttgattgaagtatgagatttttatttttgtaaatgagaagtaatttgattatgtaattttttttaagtgaaagtaagtttattagagaagtaaagaaataaaagaatggttattttatagatagagtagtgtgtgtgtatttttttttaagtgtaggtaaatgttttttgaagatgatatgttaataagaaaattggtatttggggtatatttttattaaatttgagatattttagataaaataaagatttatttttaaggtatgatttttatggtattgaagttttggaattatttgatttagttattttatgtttttaattgtgttaatttattgaaaaatattgttattaaaggtatttataagagaaacgtagagatattgttgttttttttttttttgttttaaattgttttttttgtagtatttaaggttttgttatgttttaaatatttaattattaatttaaaaagagaagtttattatagaattagaaaaaaaaatttgaaaatttatatggatttaaaaaagaggttgtgtagttaggagaatgttaagtaaaaagaataaagttggaggtattaggttattttatttaaaattatattataaggttaaagtaattaaaatagtatggtattggtagaaaaataagtatatagattaatagaatagaatagaaaatttagaaataagattttatatttataattatgtgatttttaataaatttgataaaaataagtaatggggaaaggaaacgttatttaataaatggtgttgggaaaattggttagttatatgtagaaaattgaaattggattttttttttatattttatataaaaattaatttaagatggattaaagatttaaatgtaaaatttaaaattagaaaaattttgaaagaaaatttaggtaatattatttaggatataggtatgggtaaagattttatgatgaaattgttaaaagtaattgttatagaagtaaaaattgataaatgggatttaattaaataaaagagtttttgtataggaaaagaaattattattagagcgaaaaggagataatttatagaatgggagaaaatttatgtaatttatcgatttgataaaggtttaatatttataatttaaaaagaatttaagtaaatttatatgaaaaaaataattttattaagaagtggataaagtatatgaatagatattttttaaaagaagatatataggtggttaaaaaatatattttaaaaagtttaatattattgatcgttagagaaatgtaaattaaaattataataagatattattttatgttagttagaatggtaattattaaaaagttaagaaataatagattttggcgaggttgtaaagaaataggaatgtttttatattgttggtggaaatgtaaattggtttaattaatgaggaaggtagtgtggtgattttttaaagatttagaattagaaatattatttgatttagtaattttattgtagggtatatatttaaaggaatataaattattttattataaagatatgtgtatgtgtttgtttattgtagtataatttataatagtaaagatatggaattaatttaaatgtttattaatgagggattagataaagaaaatatgatatatatatgttatggaatattatgtagttataaaaaggaatgagattaaattttttgtagggatatggatgaagttggaagttattatttttagtaaattaatataggaatagaaaattaaatattatatgtttttatttataattgtgagttgaataatgagaatatatggatatagggagaggaataatatatattgcggtttgttgggggagggcggtggtggggggagtattaggaaaaatggttaatgtatgtaggggttaatatttaggttatgggttgattggtgtagtaaattgtcgtggaattcgtttatttgtgtaataaatttgtatattttgtatatgtattttggaatttaatattaaattaaattaaattaaaggataagattaaaatgttaaggaaaaataattagattaaaagtttttaatttaaaaattttgaaataatagtttgaattttgtttttaatatatatgtaaattttttaatattgtttttttttagaggtgtagttgaatttttttttttgagtgtggtttggatttaatgatgtatttttgatatggtttggttttgtgtttttatttaaattatatttttaattgttatgcgaattgtaatttttagtattgaaggagggattttatgggaggtgattggattatgttgttttaatgatagtgagtgaatttttatgagatttgatggttttataaggggttttttttcgtttcgttttgtattttttttttttgttattatgtgaagaaggacgggtttttttttatttttgttatgattgtaagttttttggggtggtttttttagttatgtagaattgggagttagttaaattttttttttttataaattatttagttttaggtatttttttatagtagtgtgagaatagattaatataatttttgatggagtaatgtcgatataatagtttgtgattttgggtgtagaatttaaaattttttgtagtttttattttttttttttttgtttttgggattatgagttttggggaaagttagttgttgtgttatgagtagttttgtagtaaggtttatttggttaagaattgaggttttttgggatttaattataatgaattaggttttttttaatagttatgtgattgatttatgttttatgtgaatttttagttttagtgaagtttttagatgatgtaggtttagattgataattggattgtaattttgtgagaggtttttagtaagaagtatttagggaaattttttttggatttttgataattggaaattgtgggagatgattaatatttgttattttgaaatggtatattttatataatttgttatgtaatagtaaataattaatatatttttataagagaggatgtattattatatgttaatttgtatttgttttaaatttattattattattattattatttttgagatagggttttattttgttatttaggttggagtgtagtggtatgattattatgtattgtagtgtagattttttgggtttaagggattttttgattttagttttttgagtagttgggagtataattatgaattattgtgtttggttaattttttaattttttgtagagatgggggtttttttatgttgtttaggttgattttgaatttttggagttaataaatttgtttttttttgttttttataatgttaggattgtaggtgtgagttattaaatttggtttaaattaattaaaagatataaatatgtaatttagttttaaaaggtaaggagaatttttatggttgaaaaggatgtattttattatcgtttataatgattattttatttgaattttaatttgtaattgtgttttaagtgaatataaaaagaagatttagtttttgttaggttgattttatgatggttttaataataagtttttggttatttattttttttttattatttaattaattttaatataggtgttgttgtgaatggatttagtagatataattaagggttttaattagttgattttaggttgggtttatgttgtttggattgttttaattaggtgagtttttgaaaggattgggttttttttgagtatagagatttatagtgtgagagggatttagtatgaggggttttttttattgtgggttttgaaaatgaaggggttgtatagggaagaatattggtgggtattaggaattgagcgtagttttttttgttttttatattgatagttagtaaggaatagggattttagttttagaattgtaagaaattgtattttgttatttttgtataagtttgaaggaggatttaaaatgaaaatatagttttgggaagttcggaatagagattttatttatattatgtttagatttttgattaaggtattataaatagataaatgggtgttgtttggttaggcgtggtaatgtatatttgtaattttaatatttgaggagttgatataggaggattatttgtatttaggaatttgagattagttaagattaaatagtgagatatttatttttataatttttttttaattagttgggcgtggtggtatttgtttgtagttttatttattttgaagattgaggtaggaagattttttgagtttaggagtttgaggttgtagtgagttatgattatgtgattgtattttattttggatgatagagggagattttgtttttaaaaataaataaattaataataattgggtgttgtttaaagttaatgtttgtgataatttgttatgtaattttataaaatttatatataggtttaatagattcggaatgaattgatatgtatattagttatataaaataaaatattttttaattttttagtgttttatattttataattttttgtgatgtaatttaatatatttatattttatttatttagttaataaaaatttagtgtttaagatgaattaggtatgtttttatatgtttacgtgtttgatattttagaagttttataagatcgaggtggagttattggagtgttttaggtgaggaaatgatatattttgatttataggagtaggattattgtggagagaatagttacgtagtaggtaatgggataatgttagagttataatttagaagtgatagggtggtggggattaaggggagaggagggtttgagggatgaaagggatagagggaagggttggagaagtaggaggttaggaaaaggagtagagggaaggaattggaaagtagtagaatttttaggtttaaatatattgttttatagatttttattatatttatttatagagtttcgtttagtgttttttgtagttggtttttaatatttaatgtaggattgtttaaaaattaatgttttttatgttaataaggtttaaaaaatatttagtgttttttttttgtagttggtttttaatattatatttgggattgtttagaaattaattttttttaattaattaggttttaaaaatattaagtgtttttataagatatatatattatttagacgtgaatattttttaaaaataggtagtatatgagtattgttgaggggtattgtgattgtattgaatatttgtaattgtgaggtgaataaagtttgtattggttttcggttgtaatatatagtaacgtagtgtgttattttatattgaggagatgttttggatttatttagtaatttagggttgtggaatgaaggtaaatgtaaaaaataagcgggagttatagatatattgtttgcgaaagttaaatttagtagttttgtgagttttgttgtaatgtttttagatatatttatgtattaaggggttaaagttatatttttttatcgattagatatttgattatttaggggttgttaagattttgttatttattgtagttaataaataaagagaaaatttgtttttatgttgttttatgtatttaggtataattttttcggatttaaagaaaaaaaaaataaaaatttgtttttacgtttttatttttagggcgagttttttttttggtatcgagttttttttttggcggcgagttttttttttggcggcgagttttttttttgttattaagttttttggggtgagtttttttttagaagagtttagggaaataggtaaggagtgggaggtagggagtttagttttgggacggggatttcgggatgaaaaatgaagagggacggggtttatgacgagggtttttttttggttttttagatagtttttgggttaagatttagggagatattgagatagagcgtttggtataggaggagcggggttagggcgaagttttatggttttaggcgtggtttttagggttttaggtttcgaaggcgatgtattgattggggaggtttagggttggggattttttattttcgtagtttttttttttttttttttaatttatgtagggtttttttttttggatatttaggatgtggatttagtttttatttttatttggtgtcgggtttttagcgaagttaatcggcgtcgttggggtttttgttttagaagttttcgcgaatttattgggatttagattttttttagacgtcgaggatggggttatggcgtttcgaattttttttttgttgtttttgggggttttggttttgatcgagatttgggcgggtgagtgcgggattcggagggaaatggtttttgcggggaggaggtaggggttcgcgtattggggcgtaggattcggggagtagcgtaaggaggagggtcggacgggttttagttttttttcgtttttaggtatttattttataaggtattttagtatcgtcgtgtttcggtcgggtcgcggggagtttcggtatatcgtagtgggttacgtggacgatacgtagttcgtgcggttcgatagcgacgcggcgatttcgaggatgtagtcgtagtcgtcgtggttggagtaggagggatcggagtattgggatcggagtatacggaatattaggttcgcgtatagattgataagagtgaatttgtttatgtcgcgtcgttattattattagagttaggtcggtgaatgatttcggtttggggcgaaggttacgatttttttttattttttacggacgtttcgggtttttttcgcgagttttcggttttaagatttatttcgaggttgcgggattcgttagattttcgattcgggagaggtttaggcgtttttattaggttttatttttcgtttaggttaaaattttcgcgggttggtcggggcgggggcggggttcggtgggcggggttgatcgcgggggcggggttagggtttaatattttttagataatgtatggttgcgatttggggttggaagggcgtttttttcgcgggtatgaatagtacgttaacgatggtaaggattatatagttcggaattaggatttgcgtttttggatcgcggcggatatggcggtttagattattaagcgtaagtgggaggtagaagaatttgtagagtagattagggtttatttggagggtacgtgcgtggagaggttcgtagatatttggagaacgggaaggagacgttgtagtttacgggtattagggaatataagacgtttttttgatcgtttgtagattttttgggttggttttttataaagagagaaggaaaatgggattaatattagaatgtcgttttttttttggttttgagggagaggaatttttttgggtttttagattttgtataagagagtgattttgagggtttgttttgttttttgatataattaagggatgaaatttttgaggaaatgaagggaagataatttttggaatattgatgaggggttttttttgatattagtagtagttttgggtttcgttatttttttttttaggttttgttttttgttttatatttaatgtgtgtgggggtttgagtttagtttttttgagttttttagtttttatttaggttaggattagaagttattgttttttttttagggattggaattttttacggaattcggagattattttagatatttgtgtttaggttggtgtttgggttttgtgtttttttttttattttaggtgttttgtttatttttaggatggttatatgcgtgttgttggagtgttttatgagagatgtaaagtgtttgaattttttgatattttttgttagattttttttttagatatatatgatttattatttcgtttttgattataaggttattttgaggtgttgggttttgggtttttattttgtggagattatattggtttggtagtaggatggagaggattagattcgggatatggagtttttagagattaggtttgtaggggatggaattttttagaagtgggtagttgtggtggtgttttttggagaggaatagagatattcgtgttatgtgtagtatgaggggttgtttaagttttttattttgagatggggtaaggtaggagatgagtggagggggggttatgttttttaggaaagtaggagtttttttggagaattttagtagggtcggtgttgggggttgagggttagggacgtttatttttttttttttttttagagtagtttttttagtttattatttttatcgtgggtatcgttgttggtttggttttttttggagttgtagttattggagttgtggtttttgttgtgatgtgtaggaagaagaatttaggtaaggaatggatgaggagtggggtttgagattttttgttttattgagggttttaagttttagttagaagtgtgttttgtttggttattgggaagtattatttatatttatgggtttatttagtttgggttttgtgtgttagtatttatttttttgtaaagtatttgtgataatgaaggatagatttattattttgatgattatgatgatggggatttgattttagtagttataagttataggggaaggtttttgttgaggatagattttaggagggtagttggtttaggatttatatttgttttttttatgttttttgattttgttttagattagtagttatatttttaggaaatttttttgggattaaaggttagggggtttgtttagggtcgtatggttttgatttttttttggttttttataggatattttttttttatagatagagtgagttattttgaagttgtaagtaagtatgaagtgggttgatttttgatttttgggatattgtggtcgggagtttatgggggagtttatttaattttagattttttttttagtcgtattttttttgggttttgattaagttttgtttttgttttattttaggtagcgattatgcgtagggttttgatgtgttttttacggtttgtaaaggtgagatattgggggatttgatgtgggggggtgttgggggtaatagtggacgtagttgtgttatggggtttttttgaattggatgtattgagtatgtgatgggttgtttaaagtgttattttttattgtgacggatatgaatttgtttatgaatattttattttatagtgtgagatagttgttttgtgtgggattgagaggtaagatttgtttacgttttttttttgtgattttaaaaattttgattttttttttgtaaaggtatttgaatgtgtttgtgtttttgtaggtataatatgaggaggtggggagattaatttatttttatgtttattatgattttttttttttatgttgatttgtgtttcgtttttaataattaattatttttgttttatagaggtgaggttgagatgtttttatttttgttttaattttatgtgtattgagttgtaattttttatttttttattaaaattagaatttgagtataaatttatttttttaaatttttgttatgagaggttgatgggttaattaaaggagaagatttttaaaatttgagagataaaataaatggaagatatgagaattttttagagtttatatgttttttatgttgatttgttgtatgagaggagagtagatggggttgtgtttagtgggtgtttaggttatcgtgcgttttatgtggttattgtttagttgggttatttttgttgttttgttgtttttggttgtatgattcgtttttacggggtttagcgggtttttttttcgtgtgcggagatgagagattgtaataaataaaagtataagataaagagataaagagaaaatagttgggttcgggggattattgttattaagatgcggagatcggtagtggtttcgaatagttgggttcgttgatatttattgtatataagataaagggtagggtaaggaaggtgaattttttaaatgattgataaggtgaagtaagttacgtgattataggatagggggttttttttttttaggtagtatatgttattatttttttttttgtatttaagattaaagattttaagatttttattattttttttatcgttatttattataaaatttaaagaggaattaggagtataggaggagtatgaaagtggataaggagtatgattattgaagtatagtattatagggaggggtttaggtttttggatgattgtaggtagttttggataatatttagttttttataagaagttggtggagtagagtgtttttcgatttttttaaggaagggagatttttttttatggtttgttaagtaataggtgtttttttagatattggtgttattatttgattaaggagtttttaagtggtttttatgcgggcgtgatagaaggtttatattttgttttttaggttattttttataatgtttttttagtatttgattttatattcgtcggttatttttaggttattttagtaatgtaataaagagtaatattaaaagttaatgattaataatgtttataataatgattgataattgtttatgattatttttatatttaatttgtattatgattatttttattttaattattttttttattatattaaaatagtttgtgtttttagttttttgtttcggtatttgagtaattttttatttatatttggttttttagtagaattttgttttattatgatttgtgattatagggatttggatgttatttacggtagtttttgtatattagggtttttgtggtattaagagataaatttttagatcgtttaagtttttgtcgtttttttagggttttttttttattgtattttttattttttttgtaatttttttaaaggaattagattttgaaatttgttaagaggtagggttttatagttttttattataggtaattttttgttggaattttttttttgtatttttatttttttttttgttttgagttgtagtaattttagtgttggttttaatagaaatttattaatttataaagtagagtttagtttagatttatatgtggttggaaaattggatttataagtttagggttattttttttgaagagaaaaatatggttgtgtgttgtagtgtgtagtagagttggtgtggggggagggagggagggagggaggatatataagtagttttggtgagaaaagatttggtggtattgatgttagtgtgagatgatgttgttttgtagttgttataaaaataaagtatttgttttgaggttatattaataaagatattgtttttagaatagagtggttttttatgattatttttttaattgatatttgtttttgttaggtatatgattgtttttgtatttagaaagtattattaaagtaaaaatagaaaaatttcgggttttatggtgtatatgttttagatgtaagtttgtttaattcgtagttcgtgggttgtatgtggtttaggataattttgaatgtgaggatttttttgtttatttgtggtgtatttgagtttcggagtgagtgtatttattttttttagggttaggagtgaatgttttaggaatttttttttttagtgatttgaaaaagatagagggtatatttattgtgataatttagagtattagttaagggggtttgatttttaaggagttatgggaaagtttaataaagggtggtgttttagggttagaaaagatgggtagatagtaagagtattgtttgatatttatgataagtatgtaagaattgaggagttttttttttttttttttttttttttttttttttttttttttgtttttttttttttttttgttacggtttttttttttttttttttttacggtttttttttgatgtcgagtcgaagttggattgtattgttgttatttcggtttattgtaatttttttgttcgatttttttgttttagtttgtcgagtgtttgcgattgtaggcgcgcgtcgttacgtttgattggtttttatatttttttggtggagaaggggtttcgttgtgttggtcgggttggtttttagtttttaatcgcgagcgattcgttagtttcggtttttcgaggtgttaggattgtagacggagtttcgtttatttagtgtttaatggtgtttaggttggagtgtagtggcgtgatttcggtttattataatttttattttttagtcgtttgttttggttttttaaagtgttaagattgtagtttttgttcggtcgttattttgtttgggatgtgaggagtttttttgtttgattgtttagtttggaaagtgaggagtatttttgtttggtcgttattttatttaggaagtgaggagcgtttttgttcggtcgtttattatttgagatgtggggagtgtttttgtttcgtcgttttatttgggatgtgaggagcgtttttgttcggtcgtgatttcgtttgggaggtgaggagcgtttttgttcggtcgttttgtttgagaagtgaggagttttttcgttcggtagttatttcgtttgggaagtgaggagcgttttcgttcggtagttatttatttcgggagggagttggggggttagtttttcgtttagttagttttttcgttcgggaggtgaggggcgtttttgttcggtcgtttttattgggaagtgaggagtttttttgttcggttagtcgttttattcgggagggaggttggggggttagtttttcgttcggttagttttttcgttcgggaggtgaggggcgtttttgttcggtcgtttttattgggaagtgaggagtttttttgttcggttagtcgtttcgttcgggagggaggtggggggggttagtttttcgtttggttagtcgttttattcgggagggaggtgggggggttagtttttcgtttagttagttatttcgttcgggaggtgaggggtatttttgttcggttgtttttattgggaagtgaggagtttttttgttcggttattatttcgtttgggaggtgtatttaatagtttattgagaacgggttatgatgataatggcggtttagtggaatagaaaggggggaaaggtggggaaaagattgagaaatcggatggttgttttgtttgtgtagaaagaagtagatatgggagattttttattttgttttgtattaaggaaaatttttttgttttgggattttgttgatttgtgattttatttttaattttgtgttttttgaaatatgtgttgtgtttatttagggttaaatggattaagggcggtgtaagatgtgttttgttaaatagatgtttgaaggtagtatgttcgttaagagttattattattttttaattttaagtatttagggatataaatattgcggaaggtcgtagggttttttgtttaggaaaattagagatttttgtttatttgtttatttgttgattttttttttattattgttttatgattttgttaaatttttttttgtgagaaatatttaagaatgattaataaaaaaaaaaaaaagaattgaggagtaagttttatatttagaatttagtggttgaggaagtatttatatttttaagagaaagaattttgggatattatgattgttatatgttgggataattttattagtttttttgtaaaggagtttatagttatttaattaggagatgggataagtgttaatattgggtgtgagttaatattgttgtttagatttttatagtattattatgtttttattatagtggggtttatagaggttagggaataaatttggataaattatgttttacggtggaattattgggtttataaattttgttttggttatttttttattttttgtaaaaaggattttttgtaaaaagattatatcgttttaaattaggatttgagtttttggattgcggcggttatggcggtttagattatttagcgtaagtgggaggcggtttatgaggcggagtagtagatagtttatttggagggtaggtgcgtggagtggtttcgtagatatttggagaataggaaggagatattgtagtatatttgtattagggattacgggcgtttttttgatcgtttgtaatttttcgggttggttttttataaggatgggagatagatgggattaatattagaatattattttttttttggttttgagggagaagaattttttttagtttttagattttgtattagagagtgattttgaggttttatattgttttttgatataattaagggataaaatttttgaggtaatgacgggaagacgtaattaagggataaaatttttgagggaatgacgggaatacgattttttatttagtgattttaagttattaaatttgggagtagtttgttatatagtaatggataattaatgaagtttttttatatttttattattttttagaggttaattatatttgttttatttttttttattttgataatattagttatatataggtttttagttttttaatatttatttttttttttattttagtttttttttttttttgttttatttttttttttttttttttttttttttttttttttttttttttttttttttgagataaagtttcgttttgtcgtttaggttggagtgtagtggttcgatttcggtttattgtaagttttgttttttaggtttatgttatttttttgttttagttttttaagtagttgggattataggtatttgttattatgttcggttaattttttgtatttttagtagagatagggttttattatgttagttaggatggtttttattttttgatttcgtgatttgtttgttttagttttttaaagattgggattataggtatgagttattgtgtttggttttttttttttttttttttttttttttagttttttttttattttttttttttttatttttatttaaattatcgttttttttttttttttttttttttttttttttttttttttttttttttttttttttgtttttttttttatttttttttttttttttttttttttttatttttttttttttattatgaaatttttttaatatataaaataattttatgtgattgggttgtaagtaagtattttttgaatttatatgttaaaaatataatgttatgtatatgagaaataagtaaataataggaagttattaatagagtttgaataaaaatgtttgttataattttatagttaagatagtggtttttaatttaatttttttaatatagtgtttttagaatatattattaatattaagtattatatatttattgtaaaagtttaagtagttataattattttggaatttgtattattattatttagtatggttaaagtttatataacgtattatttaattaatttatttttaattatttattttggggggtttttttgtttatgtgtataggagatatgtatattaatatttatggtaaaaattggaattagttatatatatattaataggaaattagtgaaattgtggtataattatatgtaagtttttagtagtaaaaatgaatgaatgatagttttttatattatagataatttttatatataatgtgtattatgggaaaataaaggtagtaggaatttgttgtataggaagtttaaaaattagtaaaataaattgatatttgttttggggatatatatatatatatatatatatatatatatgtgtgtgtgtatatatatatatatatatatatatatatatatatatgtgtatatatatatatatatatatatatggatatatatatgtgtatatatatatatatatatatatatggatatatatatgtgtatatatatatatatatatatatatatgtatatatatatatatatatatatatatatgtgtatatatatatttattgtataaatttttgaagaaatataaaggaataagtattataagatttagtatggagttttttgttgagattagttcggttagggagattttaatttagcggtgttagaggaattaaagatatatatatagaaatatagaggtgtgaagtgggaaattaggggttttatagtttttagagttgagttttaaatagagatttatttatatatttattatagttattagtattgtttttataaatattaaattagttaaaatattttttatgggaaacgaagggatgggtcgaattaaaggaataggttgggttagttaattgtagtaggaatatgtttttaagatatagattatttatgttattgtttgtggtttaagaatgtttttaagtggttttttattttgggcgggttaggtgttttttgtttttattttcgtaaatttataattttttagtttgggtgttagggttattatgaatatgttatggtgttgtagaaattttgtttatggttagtttcggggttagtttatgattagattttgggggatttgtttttaatagtttttttttggaggatgattgggtagtagtttagggtagttttatagttttgtgttttatattagtgttgggttttttggtagttatttgattataattttttaaatagagttttttaaattaaaatatatttgttttttatagaaatgaaaaagaaaagaattttaaagtttattgtaaagatttttaataagaattatttatattggaagaaaattatagagaattgtaaggagttatgtgatagagaggattaggatgttatgaaaacggttttggttatatataggttattcgatttttggtttattggtatttttttagatttttaataatataatgtttaatatgttatgtaaggtaattttattttgtaaagattttacgttatattttattatatatataattgaattaaatttttatagaattggaaatgtatattattgattaaaataaatgaaatatgaaaagagtaggaaggaatatttagtgatggaatagtaaatatgaatggaaatagaataggattgttaaaaagaaaaaaaatttagaagtatataatagtagtgttatttagaattatagtggtgtttaaattatttttattatattttatttaatattataataaaagatgttaagtgtgttatagaatgtttattggatagttagtttttgaaaataatttgttttttaatttaagttaattatttcgggttatagtattaagttaaagttattggtattatgttaagttagatgtgttaattgaagtatgagatttttatttttgtaaatgaaaagtaattagattaggtaatttttttttgtatagtaaaagaaattattattaattagagtgaatagatatgttatagaatgggagaaaaattttgttatttgtttatttgataaaagtttagtatttagaatttataaagaatttaagtaaatttatatgaaaaaaaattttattaaaaagtggataaagaatatgaatagatatttttaaagaagatatatatgtggttaataaaaatatgaaaaagaaagtttttattattgattattagagaaatgtaaattaaaacgataaatgagatattattttatgttagttagaatggtaattattaaatagttaagaaataatagatgttggtaaggttgcggagaaataggaatgtttttatattgttggtggaaaagtaaatggttaatttattgtggaagatagtgatagtgtggcgattttttaaagatttagaattagaaatattatttgatttagtaattttattgtagggtatatatttaaaggaatataaattattttattataaagatatatgtatgtttatatttatggtagtattatttataatagtaaagatatggaattaatttaaatgtttattaatgatggtttggataaagaaaatatggtatatatatattatggaatattatgtagttataaaaaggaaggagattaagttttttgtagggatatggatgaagttggaagttattatttttagtaaatttatataggaatagaaaattaaatattatatgtttttatatataattgggaattgagtaatgagaatatatggatatagggagaggaataatatatattggggtttgttgggggagggtggtgatgggaggattattagtaaaaatagttaatgtatgttagggttaatatttaggtgatgagttgataggtgtagtaaattaatatggtatatatttatttatgtaataaatttgtatattttatatatgtattttggaatttaaaaaaaaattaaattaaaagataagtttaaagagttaatgaaaaataattagatataagaagattttgatttttagaaatttgaaataatagttataattttgtttttaatatatatttaaattttttgatattgtttttttttagaggtgtagtttaatttttttttttgagtgtggtttggatttaatgaggtatttttgaaatggtttggttttgtgtttttatttaaattttattttgagttgttatgtaaattgtaatttttatttattgggggagggattttatgggagttgattggattatggggacggtgtttttatgttgtttttttgatgttgagggaatttttatgagatttgatggttttataaggggtttttttttgttttattgtgtattttttttttttgttattatatgaagaaggacgggtttgtttttatttttgttatgattgtaagttttttggggtagtttttttagttatgtagaattgtgggttaattaaattttttttttttataaattatttagttttaggtatttttttatagtagtgtgagaatggattaatataatttttaatttatagaatagtgttaatataatagtttgtgattttgggtgtagaatataaaattaattgcggtttttattttttttttttttgaatttgggattatgagttttgggggaagttagtcgttgtgttataagtagttttgtaggaaggtttatatgattgagaattgaggttttttgggaatagataataaggaattaggttttttttaatagttatgtgattgatttatgttttttgtgaatttttagttttagcgaagtttttagatgttgcggtttttggttgataattggagtgtaattttgtgagaggttttgagtaggaagtatttagggaaattttttttggatttttgacgattggaaattgtgggagatgagaaatatttgttgtttcgagttaagttttacgtaatttgttatgtaatagtaaataatatatttttataagagaggatgtattattatatattaaattgtatttgttttaaatgtgttattattattattattatttttgagatagggttttgttttgttatttaggttggaatgtagtggtatgattattatgtattgtagtgtcgaacgtttggggttaagggattttttgattttagttttttgagtagttgcgattattattatgaattattatgtttggttaattttttaattttttgtatagatggaggttttgtttaggttgattttgaatttttggagttaataaatttttatttttttgttttttatagtgttaggatgatagatgtgagttattatatttggtttaaattaattataagatattaaatatgtaatttagttttaaaaagtaaggataatttttatggttgaagaggatgtattttatgattatttataatgattacgttatttgaattttattttttaattgtgttttaattaaatataaaaggaagatttaatttttgttaggttgattttatgatggttttaataagtagtttttggttatttatttttttttagttatttaattaattttaatgtaggtgttgttgtgaagggatttagtagatataattaagggttttaattagttgattttatgttgggtttattttgtttggattgttttaattaggtgagtttttgaaaggattgggttttttatgagtatagagatttatagtgtgaaagggatttagtatgaggggttttttttattatgggttttgaaaaggaaggggttatgggtcgggcgcggtggtttacgtttgtaatttcgatattttgggaggtcgaggcgggcggattatgaggttaggaggtcgagataattttggttaataaggtgaaattttgtttttattaagaaaaaaaaaattagagtatagtggtgggcgtttgtagttttagttatttgggattgagataggagaatggtgtgaatttaggaggcggagtttgtagtgagtagagattattgggttattgtattttagtttgggttatagagttagatttcgttttaaaaaaaaaaaaaaaaagaaaaattaaggggttgtgtaggaaagaacgttggtgagtatcgggaattgagttttttttagttttttatattgatagttagttaggaatagggattttagttttataattgtaagaaattgtattttgttatttttgtataaattcgaaggaggatttaaaatgaaaatatagtttttggaagtttagaatggagattttatttatattttgtttagatttttgattaaggaattataagtagataaatgtgtgttgttttgttaggtatggtagtgtgcgaatgaattgatgaattgatatatatattagttgtataaaataaaatttttttgaatttttttagtgttttatagtttataattatttgtgatgtaatttaatatatttatattttatttattaagttaataaaaattaatttagtttttataatgaacgaggtatttttttatatgtttaagtgtttgatattttagaagttttataagatcgaggtggagatattggagtgttttaagtggagaaatgatatatttcgatttataggagtagggttattgtgaaaagaatagttacgtagtaggttatgggatagtgttagtgttataatttatgagtgatagtgtggtgggaattaaggggagaggagggtttgaaggatgagaaggatggagggaagggttggagaagtaggaggtgaggaaaaggagtagaggaaagaatttgaaagtagtagaatttttaggtttaaagatattgttttatggattttaatatattaatttatagagtttaggagggtgtttttggtagttgttttttaatattttatgtgggtttgtttaaaaattattttttatgttaattaggtttaaaaattattaagtgtttttataaaatatatataatatttagaagtggatattttttaaaaataggtagtgtatgagtattagtgaggggtattgtgattgttttgaatagttgtaattttgaggtgaataaagtttgtaatggtttttggttgtaatatataggaatatagtggttattttgtattgaggagatgtcgtggatttatatagaaatttagagttaaggaatgatggtaaatttaaagtaagataagtaggagttatagatatattgtttgggaaagtgtaatttagtagttttgtgagttttgttgtaatgtttttggatatatttatatattaaggggttaaagttatattttttatttattagatttttgattatttaggggttattaagattttgttatttattgtagttaataaataaagagtaaattggtttttattttgttttatgtatttaggtataattttttcggattaaaaataaaaataataataataaaaatttatatttttatttttagattaagtttattttttggtattaaattttatggggtgattttttttttagaagagtttaggtggataggtaaggagtgggagttagggagtttagtttagggatagagataatgggatgaaaagtgaaaggagagggacggggtttatgtcgagggttttttttttgttttttagatagtttttgggttaagatttagggagatattgagatagagcgtttcgtataggagtagaggggttagggcgaagttttagggttttaggcgtggtttttagagttttaggtttcgaaggcggtgtatggattggggagttttagttttggggattttttaatttcgtagtttttttttttttttttttaatttacgtagggttttttattttggatatttacgacgcggatttagtttttatttttattgggtgtcgggtttttagagaagttaattagtgtcgtcgcggtcgttgttttaaagttcgtacgtatttatcgggatttagattttttttagacgtcgaggatggtcgttatggcgtttcgaattttttttttgttattttcgggggttttggttttgatttagatttgggcgggtgagtgcggggtcgggagggaaatcgtttttgcggggagaagtaaggggtttttttggcgggggcgtaggatcgggggagtcgcgtcgggacgagggtcgggtaggttttagttattgttcgtttttaggtttttattttatgaggtatttttttatattcgtgtttcggttcggtcgcggggagtttcgttttatcgtcgtgggttacgtggacgatacgtagttcgtgcggttcgatagcgacgtcgcgagttagaggatggagtcgcgggcgtcgtggatagagtaggaggggtcggagtattgggattaggagatacggaatgtgaaggtttagttatagattgatcgagtggatttggggattttgcgcggttattataattagagcgaggtcggtgagtgatttcggtcgggggcgtaggttaggattttttattttttacggacgggttaggtcgtttatagttttcgggttcgagatttatttcgaagtcgcgggatttcgagatttttgtttcgggagaggtttaggcgtttttattcggttttatttttagtttaggttaaaaattttttcgggttggtcggggttgggcggggttcgggggattgggttgatcgcggggtcggggttaggtttttatattatttagataatgtatggttgcgacgtggggtcggacgggcgtttttttcgcgggtatcggtaggacgtttacgacggtaaggattatatcgttttgaacgaggatttgcgtttttggatcgcggcggatatggcggtttagattattaagcgtaagtgggaggcggtttatgaggcggagtagttgagagtttatttggatggtacgtgcgtggagtggtttcgtagatatttggagaacgggaaggagacgttgtagcgtacgggtattaggggttacggggcgtttttttgatcgtttgtagatttttcgggttggttttttataaggaggggagataattgggattaatattagaatattattttttttttggttttgagggagaggaatttttttgggttttagattttgtattagagagtgattttgaggtttcgttttgttttttgatataattaagggataaaatttttgaaggagtgacgggaagacgatttttcgaatattgatgagtggttttttttgatatcggtagtagttttgggttcgtgatttttttttttaggttttgttttttgttttatatttaatgtgtgtgggggtttgagtttagtatttttgagttttttagtttttatttaggttaggattagaagtcgttgttttttttttagggaatagaagattattttaggtgtttgtgtttaggttggtgtttgggttttgtgtttttttttttatttcgggtgttttgtttatttttaagatggttatatgcgtgttggtggagtgttttatgatagatgtaaaatgtttgaattttttgatttttttcgttagatttttttaagatatatatgatttattattttatttttgattatgaggttattttgaggtgttgggttttgggtttttattttgcggagattatattgatttggtagcgggatggggaggattagatttaggatacggagttcgtggagattaggtttgtaggggatggaattttttagaagtgggcggttgtggtggtgttttttggagaggagtagagatatatttgttatgtgtagtatgagggtttgtttaagttttttattttgagatggggtaaggagggagatgggggtgttatgttttttagggaaagtaggagtttttttggagatttttagtagggttagggttttttatttttttttttttttttagagttgtttttttagtttattatttttatcgtgggtattattgttggtttggttttttttggagttgtgattattggagttgtggtcgttgtcgtgatgtggaggaggaagagtttaggtggagaaggggtgaagggtggggtttgagattttttgttttattgagggttttaagttttagttagaaatgtgttttgttttattattgggaagtatcgtttataattatgggtttatttagtttgggttttgtgtgttagtatttatttttttgtaaagtatttgttaaaatgaaggatagatttattattttgattacggcggtgatgggatttgattttagtagttataagttataggggaaggtttttgaggatagattttaggagggttattggtttaggatttatatttgttttttttatgttttttgatttcgttttgggtttgtagttatatatttttggaaatttttttggggtttaagattaggaggtttttttaggattttaaggttttggtttttttttggtattttataggatattttttttttatagatagaaaaggagggagttatatttaggttgtaagtaagtatgaaggaggttgatgtttgaggtttttgggatattgtgtttgggagtttatgggggagtttatttattttataattttttttttagttatattttttgtgggatttgattaggttttgtttttgttttattttaggtagtgatagtgtttagggttttgatgtgttttttatagtttgtaaaggtgagagtttggaggatttaatgtgtgttgggtgttgggcggaatagtggatatagttgtgttatggggtttttttgtattggatgtattgagtatgcgatgggttgtttaaggtgtgattttttattgtgatggatatgaatttgtttatgaatatttttttttatagtgtgagatagttgttttgtgtgggattgagaggtaagagttgtttttgtttttttttttgtgatttgaagaattttgattttgtttttgtaaaggtatttgtatgtgtttgtgttcgtgtaggtataatgtgaggaggtggggagattattttatttttatgtttattatgattttttttttacgttgatttgtgttttttttttaattattttttttgttttagagaggtggggttgaggtgtttttatttttgttttaattttatggtgtattgagttgtaattttttttttttttattaaaattagaattttagtataaatttatttttttaaatttttgttatgagaggttgatgagttaattaaaggagaagatttttaaaatttgagagataaaataaatggaagatatgagaattttttagagtttacgtgttttttgtgttgatttgttgtaggggaggagagtagatggggttgtgtttagtttttgttttggttattatgggttttatgtggttatagtttatttgggttatttttgttgttttattgtttttggttttttagtagaattttgttttattaagatttgtgattatagggagttggatgttatttagggtggtttttgtatataaatttttttgtggtattaagagataaatttttagatttgtttaggttttgttttttttttagggttttttttttaatggtattttcgatttttttttaatttttttaaaggaattagattgtgatatttgtagagaggaggggttttatagttttttattatggttaattttttgttggaattttttttttgtttttttatttttttttttgttttgagttgtagtaattttagtgttggttttaatttaaatttatagatttataaagtagagtttaatttagatttatatgtggttggaaaattgtatttataaggttagggttattgtttttgaagagaaatatatggttttgtgttgaagtgtgtaggagggttggtgtgggaggagggaggatatataagtagttttggtgagaaaagtattggcggtatggatgtttacgtgaatttatgttttttagttgttataaaatagtatttgttttgtggttatattaataaagatatgggttttagaatagggaggtgttttatagtgattatttatttaattgatatttgttgtttgttagggatatgattgtttttgtatttagaaagtatttttaaagtaaaaatagaaaaatgtttggggttatggtgtatacgttttagatgtaggtttgtttaattcgcggttcgtgggttgtatgtggtttaggataattttgaatgtgaggatttttttgtttatttgtggtgaatttgagttttggagtgagtgtatttattttttttagggttaggagtgaatgttttaggaatttttttttttagtgatttgtaaaagatagagggtatatttattgtgataatttagagtattagttaagggggtttgatttttaaggagttgtggggaaggttaataaagggtggtgttttagggttagaaaagatgggtagatagtaagggtattgtttgatatttatgataagtatgtggaattgaggagtaagttttagatttagaatttagtgattaaggatatatttatatttttaagagaaagaattttgggatacgatgatggttatatgttgggataattttattagtttttttgtaaaggagtttatagttatttaattaggagatgggataagtattaatattgggtgtgagttgatattgttgtttagatttttatagtattattatgttttttattatattggggtttatagaggttagggaataaatttagatatattatgttttatggtggaattattagttttataaattttgttttggttatttttttattttttgagtgtataattggttttgatgtattggtaattggagttattttatattgtgtttttagtttggagagtaagggattttattgtgttgaagtttaaagggaaatattttttatttaagttaaattagaagtaatattgtgttttagggtgggttttgtggagggtattgtaggtattataggggtggtattgttattatagatttgaacgatgtggggtggtgttgggattgtttgttatttttatataatttagtaatttgtatttgtagaagtttgatatggttaaagaatgaatggaattattttagatttgattaagtaggagttttgattgtagttgttatgttggttggatattattgtttggggagattaataaggttttaggtatatggtaagtagttgtggatttggtgagtgtatttttttttattttatttagaagatggatatggaatgatttatatttatatgggatttataatatatttattgatagtttgtattagggttattttaattttttaattttttataaatattattttaagagatttggacgaattagatattttatagaatattaaatttttttattttattggtaatattatataaattgggaaggatgaataatagtaggaaagtacgttgaattttttggtaaaatatgtgtattatagaaggtgaagataaaatttatagagttttaagagtggttattgtagtgaagtgttatgggtttagtggttaggggtatgtagagtttttcgtcgttatatatatatataaagtaaaagatatatttgtattttgtatttttattagaaggaaggatgtatattattttgtgagtttttttgggttttagtaatattatattttatatttaagtttattgttttggttgatattttgggtgatataggaggaggttagttttgagtggggtttggattggaaaggatattgtagtagatttaggttgtggtgtagttagttattattttttagatttttggtgttggaggtggcggtttggggaaagaagtaggatggagttgaattaagtattagtgggaaagttagaatgtagggtttgggattaggagtaaggttatggagtttatagtagagaaatatgttttatgttagaagtaatttttagtatgttattggttttgataagatagaatgtttgagtataggatattaagtaattatgtgattttaagtgttcgtgtgtattggtttttatgtgatttatagagttatttattggataggtttagcggtatttattatgagacgaaaacggtttatgtcggttgagttttaattttatgttaatatttatagaaaatatttagttttgatgtggttttgaataattaaataaattgaagataaattgaagttagttagtttgtattatggattagtttaggtttgataggaaggattcgtgagtggagtaattatagtggtagggatgaagttataaatgagtttagtagtattgtttttttattattaaggtttatttagttattgttttttttgaatattttgttcgtgagtattgtagattaatgataggtattaatagggtattattttttaaagtaattgattagtttttaagtgataagttgaatagtttgagtattatttattttggaaggggtagaagtttatttttatagggataggtttatagggatgcgatgtggtgtggtttttttttttgtttttagatttttagttaataatattattggtatttttgatttattggtttagaattttagtatattatttgtttgggggatatatttgttggggaaggggatgaagtgtgggttttgattatgggattttttggtcgtattattatttgcgttttttaagtgttgttaggtatatagagttatggataggattttataggtataatttagtattagtttggatgaaattttttgaggaatgggtgttattttttaggatgtgatgtatgtattgaattaaagacgtttttaaggtattgtttttagaaggaagaatacgcgggtttaaaaattaagaagttaaagtaggtgtgttttattttttatatttatttttagggtgatttatttataagtaaataaatatataatatgaatatttaaataaatttatttatgtatgtatgtatgtatgtatttattttatttattatatttatttttagggtgattttgttttttttatttttaaaatttggattttgtagggtaggaggttttggttttttaaagagggtattttggtaaggagataaatgagagtttatggaattatatattgtggttgtatttagggatatttgaatagtatgtgtttagagataagtaggtgagaagaggaggaggtagcgttgttattatataatgagggtaggagaagtgtgtgtggaaattaggaatttatttggggacgttttggttttttttgttcgttgtgtgagcggaattatttagtaatttagtttgagagggtttgatatttaagagtttagaatttttaggaaggaaggattgagtgatatttttaggtaatgttttacgtttttgtttttgtgttttgatatttttagtaggattagtgtagaagttttgtttttatgagttgtttttagttagtgatcggttatagtaagtatattaaggtaggttattattgggagatatgggatttttttgatggttaaatgtggttttaggatttttttatgtttttttttaattttttttagattgtttttgttttaggatgcgtcgaatagattttgtttttttttgtttagtatttggggttatatttgtattattgtttgtcgttttttttagggatttttggttcgcgttttatatttttttataggtgtgtttttttataagatgtcgtagattttaagtttattttggtatttgttttttggaggatttggattaaaaagtattgttatgtgtatattaataatttttatttattttaatttgtaaaatttatttttttaattaatttttgttatttttataaaatttattttgcgcgcgttcgtagtatttttttgaattaatagatatttgttgtattaagttattaaattttgaggtagtttgtgatatagtagttaataattattaaggtttttttaagtttttgttattttatggatgttatttatattttttaattttttgtattttaataatattagttatatttgttgtttttaattttttttttttatttttttttgaaaatgtttattttgtttttttttgtttttttatttttttttttttttttttttttttagagttttttttttttttttatttttttataaattttatgtggttaggttaaaaagaattattatttgaattttatgtttaaagtataatgttataatttataggataaaagtaaagaaaaggaaggtattaatggaatatgaaaaaatgtttagggtgattttgtagttaagataatggttttttaatatgtaatttttatttttaattgaatgtttttagaatatatgagtaatataagtttttttttatttttggtataagtatttgggaaattaaattagttttattttgtatgattaatgtttatatattgtataattttattatttgtttttgattatatattttggggatatttttggttatgtgttttagagacgtgtatattaatgtttatggtaaaaaaattggaaataattatatatgtattaatgggaattaataaaattttgatataattacgaaaagtaaaattttagtagtaaaaatgattgaatagtatttttttatattagagataatttttttatatataatatgtattatagaagaatatatatagtgtgagttttttgtatagcgaagttaaaaaaataggttagattgtgatttgggtatatatatttattgtaaaaatttttagagatagtgtaaaggattagtaaatataagatttaagatagaggttttttttggtggataggattgggtaatagtttagggtggttttataggttttgttttttatgttaggagaggatgtttaggtaattagttatttgattataaatttttatttatttatttatttatttatttttgagatggagttttatttttgttgtttaagcgggagtgtaatggtgtgatttcgttttattgtaattttcgttttttatgtttaagcgatttttttattttagtttttgagtagttaggattataggtatttgttatgatgttcggttaatttttgtatttttcgtatagattgtgttttattatgttggttaggttggtttttaatttttgattttaggtgatttatttatttcggttttttaaaatgttgggattagaagtatgagttattatttttggtttataaatatttatagtggtaatttttaaaatgtattttgtgtgttatttttgattatttggaaatgaaagagaaaagaaaatataaaagtttattgtaaggatttttagtaataattatatgagttaaaataaagttatagttaattgtaaggagttatgtgatagagagtattaggatgttatgaaaaaatagtttttgatagaaataggttatttgatttttggttaattggtaattttttatattttttggtgtataatgtttaatttgatgtgtaaggtaattgtatttcgtaaagaatttgagaatttgatatgttgtttaattttattacggatataagtgaattaaatttttatagaatagaaaaaaagtattgtcgagtaaaataaattaaatgaaaatatataaaggaataattagtgatgaaatagtaatacgaatggaaaatacgaaagagttttttttatagtaatattagaagtataaaataattgtattttttagaattatattggagtttaaattatttttattatatttaattaaaaaatatagcgaaagatgttaaattgattaatggatgtatattgaatatttagttattgaaaaatcgtgtttttagattggagttaattattttcgtttattatattaaattaaatttttgtcgtgatgttaagttagttgtatagataaagatgtgagatatattttttttaattgtaaagtattttgattaggtaaatatttttgtagaagtttgagtaagaaaattgatattttgggtatttttaaaaggaattagtagtttttgaggaaaaagaaagatagttatgattgtaaaggtattattatacggtattagtcgtgggattttttggtttagttattgtatttttttaatttttttgtaatttattaaagagaatattaatattaaaggtatttgtaaaaaaaatttgagatattgttgtatttttattttttgttttaaagttttatttattattttataaaagataattttaaagtattaaagaaaattagttagatataagaagtatttgatttataaaattttgaaataataatgttaattgtggtgttagttatttgggaggttgaaggaggagtattgatggtatgagtttaggaggttgaggttttagtgaattatgagtatgttattgtattttagttagggtaatagagtgttattttgtttaaaaataattaattagttaattaattaattaaataaataaataatggaggtagtgtacgagttttggtgaagggtattttggttgtattgagtatttgtagatttgaggtgattatattttgtacgttatttaatatgtatattgtatatatttaatatgtatataaattttttgatatttttttttgtagaggtgtagttttattttttttttgtgagtgtggtttgaatttaatgatttatttatagattgatagagtaatgttgagataatagtttgtgattttgggtgtagattataagatttattaagtttgggagcggttatttacgtttgtaattttaatattttgggaggttaagagggtagattatgaagttagaagttcgagattagtttggttaagatggtgaaatttcgtttttattaaaaatataaaaattagttaggtgtggtggtgtatgtttgtaattttagttgtttaggaggttgaggtaggagaattatttgaatttggaagtcggaggttgtagtgagttaagatttagttattgtattttagtttgggtgatagggtgagattttgttttaaaaaataaataaataaataaataaataaataaataaaaaatttattgtagttttttattttggttttggttttttttttttttgggattatgagttttgggggaagttagttgttgtgttataagtaggtttgtggaaagttttaagtgattaggaagtgaggttttttggggttagataataagaagatgaagttttttttaatagttacgtgggatatttttgtgatttgtgaatttttagttttatttgagtttttagatgataaagttttggatgataattagatcgtaattttgtgagtggttttgagttagaagaattttgagaaaatttttttggatttttgattattagaaattgtgggatatgataaatatttgttgattttagttgttaagttttaagtgatttgttatgtattagtagataattaatatatttttataagagaggatgaattattgaattttttatttgttttaaattgattataagatattaaatatgttatttgtttttaatatttaataagaatttttatggttatataagatatattttattattattaataatgattaattttttttatttttaatttgtatgttttatttaaatataaaaggaagagttaggttatgttagggtgattttatgatgatattttaataattatttttggttgtttatattattttagttattcggttgatattaatgtaggtgttgttgtgaagggattttgtagatgtattttaggttttttgttagttggttttaagatggggattattttgtttggattgttttaattaggtaagttttgaaaaggattgggttttttttgagaatagagatttatagtgtgagagggatttagtgtgaggggttttttttattgtgggttttgaaaatggtgggattatggtgaaagaatattggtggttaataggaagtagaagttttttttattgtttattttgatagtttgaaggaaatagggattttagttttataattattagaaatcgaattttgttaacgagttttatataagtttgggggagaattttaattttaagatgaggatatagttttgcgaaattttgaataaagaatttttgatattaggtttggatttttgatgaaggaaatgtagaaaaataaatgagtgtttttttaagttattaagtttgtggtaattggttatgtattaatagaaaatttataaatagatttaatagttaagtatatgatattttttttaatggaatgaatttatgaattgatatgtatagtagttgtataaaattaaatgttttttaatttgttttgtattttttattttgtgatttttgtgtgatataatttttaatataattatattttatttatttaagaaaattaatttagtgtttattatgtgttagatatgtttttagatgttgtagatataattttgattaaaataatttaaagtttttgtgtttgtgttttttattttagaggttttttgagagtgagatggagttattggagtgttttaagtgaagaaatgatataatttgatttatattagtaggatttttgattattgttgggagaatagttatgggtagtaggcgaggggatagagttagggtcgtaatttagtagtgatagagtagtagagattaaggggagaggagggtttgatgggtgatagggatagagagaagggttggagaagtaggaggtgaggtaaaggaatagagagaaagaattttaaagtaatggaatttttagatttaaatatagggttttatagatttttaatttatttatttttagagtttggtatagtgttatttgtattttggtttttaatatattttgtggggttgtttaataattaattgtttttttatgataaataggttagaaaagaatattaggtgttttaataaaatatgtatatagtttagatgtgaataatttttaaatataggtaggtgtatgagatggttattgtggtttatgtttgtaatattagtattttgggaggttgaggtaggaggattatttgagtttaggagtttaagattagcgagagtaatatagggagattttatttttataaatttttttttagaaaaattagttaggagtggtggtataagtttgtggtgttagatatttggaggttgaaggaggagtattgatcgtatgagtttaggaggtcgaggttttagtgagttatgaacgtgttatagtattttagttagggtaatagagtgatattcggtttaaaaataattaattaattaaataaatgataaataaaggcggtgtatgagtattggtgaagggtattttggttgtattgagtatttgtaaatttgaggtgattaaattttgtataggtttttggttgtaatatacggtaatatattgtgttttgtattgagatgttttggattcgcgtatataaatttagggttataagataaagataatttaaaaatataatagattagagttatagatatatagtttgggaaagtaaaatttaattttgtgagtttaattgtaatgcgtttagatatatttatatataatggggttaaaaattattttttttataaattagattcgtgattatttaggggttattaagattgtgttagttattgtattgcgttatttattgttattaagattgtgttatttcgttgcgggattagcggagattttttatttaataaaagttttaggcgtttatatcggattttatttttagtttaggtttaaattttcgggggttggtcgaggttgaggcggggtttcgtcgaggttgaggcggggtttagcggtttgggttgatcgtagtcgttgggaatgggttttatattttttaatgggtatatagttgcgacgtggattcggattgtagtttttttagtgggtatgaatatattttattacggcgttagttatttcgttcgaaattaggaattgcgtttttggattgtagcggataaggcggtttagatgttttggcggaggaataggtagagttgtttaaaatttatttgtagggaaggtgggcggagtggtttagtaaagtttttaagaatgggaaggagaggttgtagtgtttaggtattagtggttacggggtgtttttttgattttttgtagatttttttgagttatattttaaaagaagggaaggaaaatgggattaacgttaaaatattttttttttttttgtgaggaggaagagttttttcgggtttttagattttatattagagagtgattgagggtttgttttgtattttgggatagttaaaggatgaagtttttgagggaaaggaggggaagataatttttgaaatattgattcgcggttttttttgtttttatagtagttttgggtattaggaattttttttttaggttttgttttttgttttatatttaatgtgtatttgtgggtttgattttagtttttttgatttcggttttcgtttaggttaggattagaaatttttgtttcggttttagatattaaaattttttaaggaatagaagattgttttaggtgtttgtgtttagattggtgtttgagttgtttttttttttattttaggtgtttcgttaatttttaggatggttttatgaggtggaatgttttatgaggaatgtaaagtgtttgaattttttgatttttttttttagaattttaaagatttatatgatttattattttatttttgattatgaggttattttgaggtgttgggttttgggtttttattttgtggagattatattgatttagtagtgggatggataggattaaatgtaggatgtagaggttgtggagattatatttgtagggtatagaattttttagaagtgggtagttgtggtggtgttttttggagaggagtagagatatatatgttatgtgtagtacgatgggttgttagagttttttattttgagatgggtaaggaaggggatgaggggttatgtttttttttacgggaattaggagtttttttggagttttttagtaaggttagggtttgaggtttgatggttagggttttttacgtttttttttttttttatagttgtttttttagtttattatttttattatgggtatcgttattgttttggttgtttttggtgttgtttttattagagttgtggttattgttgtgatgtgaagaataagagtttaggtaggaaaggggtgagtttcgagttttttttttttattggtggatttttagttttagatgggagttggtttgtattttgtttagttatgaggtattatttttgtttattaatatttatttttttgtaaagaatttgtgaaaatgaaggataaatttattatttttattggagttatgggaatttgatttttagtagttataggttaggggaaggtattcgtagaggatagattttattaggataattagtttagttttaatatatttttttatttagggttttttgattttgatttgggtttgtagttatagttttggatatttttttgggattttatgattttgttttttttttggttttttatagtttattttttttttatagatggaaaaggaggtagttatgtttaggttttatgtaagtgtggtaggggtgggaagagtgatttttgagatttttgtgatagtgtagataggagtttatgggggagtttattattttaaaattttttttttagttatattatttgtgggttttgattagattttgtttttgttttattcgaaatagggatagtatttagggttttgatgtgttttttaaggtttgtaaaatgataatttagggggtttgaagggaaggaggagttggggtataggggatataattaggttttggagattttttgatttggaattttttagggtgtggtgggttgtttagtgttataatttattatgattgatttgaatttgtttatgattattttttttttaagattgttttgtgagggattgagatgtaagatttgtttatgttttttttttgtgattttaagggtttttgttttttttttttgttaaggtgtttgaatgtgtttatatttttggtattatgtgagaagtggggagattagtttatttttatgtttattatgatttttgatattgtttggatttgtgtttttatttaaattttatgtttatttgtaattattaaggttggaggtggtattttagggaggtgattggtttatgaggatggattttttatgaatagtttaggattatttttttggtgttgtttttgtgatagtttttataacgtttggtgtttaaaagtgtgtggtatttttttgtttttttttttttttattttaggtttgtaagttatgtttatttttttttaattttttagtatgattgaaaattttttgaggtttttttataagttgagtagatgttagaattatatttttatatagtttgtagaattatgagttaatttaaattttttgtttttataaattatttagttttaggtatttttttataatagttgagaatgaataatttagaaaatcggtattagaagttgggtattgtaataaacgtagttgaaaatgtgaaaatgtttttggaattgggtaataggtagaggttggaagagtttggagagtttagaagataagaaaatgggggaaaatttgtaattttttagaggtttgttaaattgttgtgattaaaatgttgatagtgatatagataatagagtttaggttgatgaggttttagatggagatgaggaatttattgggatttagagaaaaggttatttttgttatgtattggtaaagaatttggaggtattttgttttttttttagggatttgtggaattttgaatatgagggtgatgattaagggtatttgatagaagaaatttttaagtagtatagtatttaagatttggttttttgttgtaatagtttatgtatatatgtgtgagtaaaaaaatgatttgaaattggaattgatatttaaaggggaaatttaatatttaggataatttttagtggagttgtaggagtaggatttttattaggattattaaatggtggagttattggtaatgtgtaagtttagtttggaaaatttataggtatttaatttttatttatgagagtagttatatgggttatgtttagtaaagttaaggatgtggggttgtaaatggtattgtgagtttattatttgaattagtgtgtttaggatttaagatatagggttaaaggagattattttagagttttaaattttaatattttttatgatgagttttagttttgtgaggatattgtatttattttttttggtttatttattttttttagaatggaaatgtataagaaatgttttttttatttttgtattaatattttagaagtaaataatttttttaaaattttataggtttatagttatagggatttattttgagttttagatgagattttggaattttgagttgatgttggaataatttagtatatttgggataattgggaaattattatattttgtaatgggagaaaaatatgagttttggttggttagggatagaatgtaatgatataaatatttattttttgatattttatgttaaaatttgatttttagtgttggacgtggggtttaatgggtgttgtttgggttatgggggttaattttttatgaataaagagattttgttttttttcgtaagtgaatgaattgttatttttttagtttttaagagagttagttgttaaaaagagtttggtaattttttaagttttttgttttttttttatcgtgtgatttttgtatatattagtttttttttgttttttgttatgagtgggagtagtttgaggtttttattaaatgtttaaatatttttagatattagaattttaagttatatgaattttgtttatataaattagttagtttttgatatttttttatagtaatataaaatggaataagatagcgtttttattataggtatgtgtttttggtagttagtttttatttttaagatatttagggttcgtttagttatgagtttttttattaatattttaatttttattatttaagagattttaaggtttttaggagaaattagggataaagattaaatgtttttgttatattttagattattcgtttttttttgattatatattttttataggaaaaggattataaaagtaaagaggtattggcgtattattagagttttatttagttatttaaaattagaatagtttattattttttcgtatgaatatgttttttagaatgaagttatttaggtttgtagatattatttaattttattaggttttaaaaataagaatggttttaaggatatatggttttatttttttaggtatttagtataattgatttaagagataatatttttttttgtttatagtatttttgaggagttaagttaatattgaattttttttattatataattttttgatttagttatttatttttagttattatttttttttttgtttttttatattagttttttttagttttagaggtgatattaggtttgtttgttgtgttgatttagattgtaggtagtaatagtattttagtatgttttttttcggtttatttttggttatagagggtaggttatgtaggtaaggaattagtgggggttatttgattattaggttatatagttttatttattgttaattttgattttgttagatgaaatgaaggtatagtattatttttgagttgtttgggaatttttatataaagatgtaaatatatagttatggtttttggtttaaagataatttttgtttttggtattttgatttttatttttatttttggtattattgtattatatatgaaaaaagaaatttgaggtgaagcgtagttattattttagtatttttttttttttagaagaattgtatgtatagttataatagtatcgttttgatttattaggtaaaagagaggaagttatttagaggagttatttttgtagttttatttatgtggatagtgagtatatttatgaagatgtaaaagttagttttttatgtttatattgtttaataattatattgttagtttttagataaataatgttttaattgattattttaattttttattaaagtttttttttgaggaggatatttttttgtgtattgttagttatttgaggttgtaaagtgtgtttttttgcgtaaagaaatgggatttagtagtttatattggtgtaatttttttttttttggtgattttatagtttttgaagtattgatttttttttttggttgagtatagtttaatttagagttagtgatttttttgttaagattttttggtagtttttttggggttgttgttattagtttggtttgttagttatgtatgattaaagtttttttattagagaattatatagttatttgttgtttttgtttgtttttttgattaatagttaaaatagagatgataagaaatgagataaattattaaaattgtgaataaaagagagattattattagtgattttttagaaatttaaaagtattataagtgaagattttgaaaaatttgaagttaataagttagattatttagataaaatggatagatttatataaagatagaaattgttaaaattgatttaaaaataattagaaaatttgaaataaggaaaaataaaaaataataatgtattgtttgttgttttatttggtttaaaaagtttatttgttagtttttagttttttggtttaagtttagtttaaataaggattgtatatgttaagttttaattttttatgtgaatgataaaattttatttttataagaggagatgggttatgttgtttgttggattagtgaattaagtttcgtgtttttttttaaagagaaataaaaagagtatagtaaagagtttttatttagtgaaaagttttgggattttttaatacgtttgttttatattttatatattttataaagtagaggatagggagattagggggtaaaaggaaggttagaggaaaaggatttgggaggttatgaaggagttaaatttaatgtttttttaaatttttatttaaatttgaggaaagaattagaataatgtaaggaaggataaatttgataaaaataagtaatggggaaaggattttcgatttaataaatggtgttgggaaaattggttagttatatgtagaaaattgaaattggattttttttttatattttatataaaaattaatttaagatggattaaagatttaaatataagatttaaaattgtaaaaattttagaagaaaatttaggtaatattatttaggatttaggtatgggcgaagattttatgattaaaatataaaaagtaatggtaacgaaagttagaattgattaatgggatttaattaaatttaagagtttttgtatagtaaaagaaattattattagagtgaataggttatttatggaatgggagaaaatttttgtaatttgtttatttgataaagggttaatatttagaatttataaagaatttaatttatatgaaaaaaataaataattttattaaaaagtgggcgacggatatgaaaagatattttttaaaagaagatatttatgtagttaataaatatatgaaaaaaggtttatagttatttattattagagaaatgtaaattaaaattataatgagatattattttatattaattagaatggcgattattaaaaagttaggaaataatagatgttggagaggatgtggagaaataggaacgtttttatattgttggtcggagtgtaaattagtttaattatcgtggaagataatgtggtaattttttaaggatttagaattagaaatattatttgatttagtaattttataattttattattggatatatatttaaaggattataaatattttattataaagatatatatatatatatgtttattgtagtattgtttataatagtaaagatttggaattaatttaaatgtttattaatgatagattgaataaagaaaatgtggtatatatatattatggaatattatgtagttataaaaaggatgagtttatgttttttgtagggatatggatgaagttggaaattattatttttaggaaattattagttacgtgttttttgggttttttagagaaagatttataagaatagaaaattaaatattgtatgtttttatttaaatgggagttgaataatgagaatatatggatatagggaggggaatattatatattggggtttgtttgagggtagggggttaggggagggatagtattaggagaaatatttaatgtagatgatgagttgatgggtgtagtaaattattatggtatatgtatatttatgtaataaatttgtatgttttgtacgtgtattttagagtttaaagtataataatgttaataataataaattggatttgtaagtgtgtttttaataagtattgaggttaggaattttaaaaaggaaatgaggttattttcggaagatttttttagtttagtagaatagttagattaatttttagaatttaatttttatatttgggttgagataatttaattatgaatattttgtttattgggaaaaagacgggaataattagaagggtagttataattatttgggagagatagtagtatttttttgggtaatgagttttgttagttaagtagaaatttttaaatgtagattttggatgggataataatgattttagggatcgggtttaaatgtaagattatagggagttaataattagagggattatgtagtttatttataggatataaaacgtttttaaagtatttaagatttaataataagaagaggagattttttttgtatttttgtagaggtttagggattaagtgaaaaaatatttaggattaaatttagaggatttagtagggtaaggttttttaaaggttaattttgtaattaaaagttgatgtaatattattaagaaattgtaaaagattaacggatggaataaaaaattaattaaggaaatattgagggaagtttagaaagtttgtgtgtgtgtgtgagagaaagagagagagagagagttaagttgttatatttgaaggaagagagagttagcggtatagttgtgtgtggtagttggtttttaaaagttgttgataaaggttattgttgagttattttcgtagagttgtttgtttttgtagatagataaggggagttagggtatagtacggttcggtttatgtttagagaaagaggaagaagttgagtgtgagatagaaaggaaatgggatgatagagagagaatagaagaggaaaattagtaagagagattaaaagagatagagattaaagagaaatatagaaggtaaaattggggagataaataatgtaaaaggaaaaaagagtataagataaagtgagagaatgttgagaggttggtagggttgggggaagtttttggggatttaagtaataaggaggtgtaggggaagggtgtatgtagtgcgtggttattgaggaacgataaaattcgggaattgggggatggatgtaagtgagaaagggatgtggaggagagtttaggattaggttgtttgaggtgtaacgggttgtttatagtaaaaattagatggttgtttattaggaggtggttaaaaggatttaagttatggaagagtaaatgaataagataatattaaggttttgttgttttagtgagaggttggaaggttattaggggtagttagttgttagtaaggtagtagaagggttggggtcgttatataaggaaaattagtattagggttgtaaatttaaatgattatagggttagtaaataataaaaaggagggttgtagggttgggtgggaattgtggcggttgtttagttttttttatagtgttggtattgtgttgttagattgtttgttttgttagaggataaaattttgattttttatgtaaaatataattttaaaatgttgatattttgtttaaataatttaaaaatttaaaataggtaaaagaggatgttagtttgtaatttttgaagtagagagagttcgtgttggggaaaagtttgttaaaatgttttaaggtggaatgtgtaaaagttttgttttttagagtcgggttgggttaggggaggatttttgtagtttaggaggaggaaaagttattaagtttttttttagggttggataaattggagattttttatagttgttgggttattagtgggggttgtttgaaatataaatagtgtatttttaggtttgttacggagaggaacggtgtttttgaagtataaaaaaaaaaaaaaaataggaagggagggcggagttagaaatgttttttttaatgagagtatttattagggaaggttttataggttggtagatttttaaattagtagtttttggtttaaagttaaatttagtagggttcggttaagggtattttgggatgttagttggttagttttttgtttttttaagttttttttggggttaatgggttttcgggaggtgattaaattaatattagttagttttttatgaaaaggagaggagaataagaaggcgttagagtataattgtttagatattatagagtattaaattaaagttagtattaaattttaaaggaattttattatataatgggatgaggttgtttatgaatgggttattttgagtaataaatggtaaaagatataatggttgtgttgttatgaataaaaataaataatttttatgtgaaaaagttaaattatttaataattggttagtttaaatttgtaaattttatgtttttaattagattttaaagtttttagaagattaagaagatattatatatattaattttaaatatgtttataaagtagtatatatttttgaaaaaatttggatagagtagggtttagaaaatagtagggtaaaataattggtatatggggaataagttttagaaagttttttgtttttagtagagatagttatagtttatgtaaatggttattagaaaagaaatattatagaagttgtagggaataggtttgtggataaggttgttaagtaagtttttttggaggaaaaatttaaattgtttagtttagatatttttaaggtgatattaaaattttaatttttaaaagaggaggaaaagttaggtaagataggagttatttaaattaagaatggaaggtgagtgttttttgatgggagagaaataataaataaatttataataaaaaatttaatgttggtcgggtgcggtggtttatgtttgtaattttagtattttgggaggcggaggcgggtagattataaggttaggagattaaaattattttggttaatatagtgaaattttgtttttattaaaaatataaaaaagtagtcggggcgtggtggtgggtgtttgtagttttagttattcgggaggttgaggtaggagaatggtatgaatttaagaggtggagtttgtagtgagtcgagatcgtgttattgtattttagtttgggtgatagagcgagattttgtttaaaaaaagaaaaaaaatttaatgtttatattgtataagggaagttattggggtttttaggatatgtatgatgaaatattaaagaattatgggtgtatagaaatgtatgttttggttaaataagtgtgtgggaattgtgtgaatttttaggaaataatttaaggttaaaagaatttgtaatataaattttattttttgagtttatagtttattatttttagtttggtaatttagtgttaattaagatttggaaagaagataagttttatttaagttgggaaggtttttattaagtgaggtagttgtataaatagttgattaggggtggatatattatattcgggttaagaaattggttaaaaaaaaaaaaaacggaaggtaaattggaagtgtatagattatttaagaaattttttaagttaattttaaggaaaatttaaaagtaagttataagtaggttttattattgggggttgatatggttagaattaattttaatataaggggtgaaaggaaatttaagtattgtataagaattatacgttatttaattgtaaaaatttaaagtgtaattttatattaattattataaataatttagttattttaaattagaaattttgaaggtataaattaaaaataaatattttagaaaggaatttcgtgggatagttagtttttaggttagttattaattttattttaagtttatttagaattattagaatttttggttttattaattttttttaatttattaaataataaatttaagagagtaaaaataattaaagtaattgatttaaggtagattttaaaaattaaaataggatatagagatataaatgtttgtgttaaatgggtgaaatttttagtataagttttcgataaaagtaattgttatgtatgtgttgttggttaattttaggtataggtggttttatttttttttggatgggatattaattttaaaggaatgtgttgcgtgttggttgtatattaagataaggttgtatggggaaataagatttgtaaaagtttgttattgtttttttttattttgtagagattagattttaaagtaatttttttattttttatagggaatataaattatttttgttgttattttagatagaaggtgaggttcgataaatttgtgggaaaattcgtaatttgtatttatattttaaatgttattggtaatttagattgtggtaattatttaattttttatatattttaggtaaatgtttggtggtatttcgggaaagggaattttcgtaatttgttatcgtttaattggatcgggatttgtgttttagtataattggttatttcgtttattttgttattttatgaaatagttaaaaatatatatggttatagagattagagtaatttagtaatttattttaatttatatataatgtgtgtgtgtgtatatatatatatatatatatatatatataaatatatatatatatatatatatatatatatatatatatatatatatatatatatatatatatatatatatatatatatatatataaggtttttggaatagtggatgaaagttttgtatatttatttatttatttatttatttatttatttatttaaattttataggagtatttagaggagtgtttaataaatttaaagtacgaaattaaatatttgttagatttgagttagtatttttttggtggttaattattaataagaatgtaaattagattaattatatgttttataattagtaaagatttattaattatacgtaaaatgtttttaagggagtagttagataattaaatgttattagttaaatggtttgggaaaatagaattatattggatataatattagtagagaaaggtgatatatgtgatatgttgggtggaaaatgtgatatttttatttataataatgttgttttaaatggaattattataaagggatggtagggattaataattttagttaacgagttggtagaaaatataggagtaaatgatttttttattaattggttagaaggttggtttgaaaaatggaaaggaatggtatttttagtttttatatttttcgtgattatggttggggttttaatagttataggatgttgtattatattttgtgtgaagggtttatttaatataaaggttaattaaagtagttattagtaaataaatgtttttaatgttttaatagaatgatttattattattaaaagttaaattaaatttttttttttataatgaagaaagtaaaaaatttttagaatagttaataaataaagatatgtaagtgaaaataagattaaaaagggtaaaaagaaaaagaggaggtaagtgtaaaaaataatttatatgtgaagaaggtttatttttataagtgttttagaatatgtttaagtaggttatatggaaataaagagataaagaagtaaaatatattaagttataatttttttttttttgttttttttttgatttagtgtttaggagtttattggttagggtttttttaatgatttttttttttattttattaaagaatttagtttgggttagtttgttattatttaagtgtagttattagggttataagttaaatgtttagagttttgagatagtcgttatgtattatgggtggttgtaataaaatgtagtaaaaaatgtagtaaaaagattttaaagaatatatttgaagttttaatataattattaataggcgatgtttaggaagattataatttcgtagtatttagttaatgaggaattgggggagggatttgtatattagggaagaaatagtttgttgaaattgttttaggtgtatttgtattttagatatttgattttgtaagattgttattaaaagtttttttttcgttgttttttgggtttttgagtttattttttgggtttgaatgggtgagttttttttttatagggatgtagatggtaacgtggtttttattttttttttaaatattttaatttttatcgtttgttttagaagttttgttatttataagtttatttgtatagaaggtatgaggggatattatagtttagatagggatttttttatttttagtaattgttttttttttttatttggattttttgtatttgatgttgttttttttttgtattaaaggatatagagaataataatattattaataatattaatgatgatgaaagtagtaatagtagtaatatatggaatggttggttattaattttgaagtattagggttatttttgaaaaaaatggtttgttatatattgggtatttatagttatagtcgtttttgttgtttttattttggtttgattttttttatgttggaatttttaagggtggttttagttttattagaggatatagggtgagtgttgtgatttttgttgtattttatggagtagatgattttttgtttttttttttggggaattttgtaggttatttttgtttggtaggttttattttattggatagaatattttaagattgtcgggtattttggtttaaagacgttttattttgttattaggttagagagatattttggagatataagttagagtttagtatattagggtgatgttgttttttagggttttattgtaggttatatttatggtggaggagggggggattggagaagaaagggtagagataatgaggtatatggttaaattttgtttttttttaatggagatgtagggaatagggttggttcgttttattgtttcgattttggtagaagtttttacggattttagattttttgtaagtttgtttttattttggggattaattttttaaggttggtagaaggatgggtttcgagattgtgtttttatgttttgggatttttgtattgatgttgaggaggggaatgttaggggtgggtttttggtatatggggttagagggaattttttgggatgggtaggttgggaagtagatggggtagttttggttttgggggtttttttttttgtttgatatttattcggtttaggtttttgttagagggttttttgtttttttagattgtgatattggattttttaatttttgatttattgtttttttttagtggttttaataggagagaaaaattaggatataatatattaatagaaaatatatgtatttatagtataaggagggtttttttggatagagttgggggtcggggtgattttagtggaataggggagaggaaagtttttatttaggtttagtatttgtttttttgatatttatataggtttttagatattgttgtagtttttgtttgtagtttatttatatagggtgagagtgtgttttagtcggtatagtattttttttttagaaatttgtgatgtttatagtaaaggtttgagttttggaggattgggatattgtttatttttgagtttttaggttgagagagaggaagagttatttataagagtaggaatgtttagagtttttggtgttgttggttttttgattttataatttttaattttttggagggaatgtaaggttatttttatttagtagttttaagtgaggaatttagattagaggagatttttttttggtttttttttatgtttttttgtgtgggttgagtgttaggttattttttcgtcgagttttgttgatttttattttttatttttatttttagttagatttagtggggatagataggtttttgttttttgtttttagtttttttggaaaaggttttttattatttttgtttgttgttaatttttattttttttttgttttttgatatatgttagggtttttttgaggttttgtttattttttgttaagtttttagtttttgtgttttaggttttagtttttagaattgtttttgtttattgttttcgggatttagttttgtttttttgtttgttgaagagtaggaagggttgattatttagatgttttttagtaagaaattttgattgtatagatttattttaggatagtatcgtgaggttgtaatgaagattgtggggttttggggaataagaaattatagatgaaatttttttttggaagtaattttatattgatgtttaatatataggtttgttgttttaatttttttgaggaggtaggaaatgtatatatgtaaagggataagaatgaggattttagatataaggaaaattgggagggtaggaggatggaggagtagattgaggaatagaagaagggggaatggagatggtaaatatgtaggttagttgttaaggtagggtggttataggttatttaagggtatagggaggaggttaaggagagaggttgttttgtagtggtgagggaggagtacgaaggtagtggtggaaggaaggttttgttagaggggagggtggaaatgggaagggatttaggtttagagggatttatgattagtatggttgtgttatataggtgagggtgagatggagttacgggtcgttgtttttgaggaaggtttattatgtataagatgggagtaagggaggattagtgtatttttttaagaaatagtgttaggaaaacgatatttatatgtaaaaagaaatgaagttggatttttgatttatattatatatataagttaattttaaataaattaaagatttatatttaggaattaaaattgaaaaatttttagaatgaaatattgggaataatttttatgatataggttttgataatatttttatggatataatattaaagtatagataataaagaaaaaattgataagttggatttattaaaataaaaaaaattgagtattaaaaaatataatttgtagagtgaaaaagtaattattagaatggaagaaaatatttgtaaattatttatttaataaaagattaatatttagaatatataaagaatttttgtaatataaatataagatttaaaaaaattatgtaggtaaagaatttgaatagttaattttttgaagaagatatataaatggttaatagatatatgaaaagatgtttaatatttgtagttattagggaaatgtaaattaaaattgtaatgggttattattttatattaattaggatggttataattaaatatatatatatatatacgtatatatatagagagagagaaaaagtaagtttggtaaagaggtagagaaattggaacgtttgtgtagtatattgggaaagataaagtggggtatttgttatggaaattagtgtgttgttttttttaaaaattaaaaaattaattattatgtaatttagaaattttatatttgggtatttatttaaaagaaatgaaagtaggaatattaaaaagatatttgaatatttatgtttatagtagtataatttttaatagttaaatttatagagatagagagtagaattagtggttttagcggttagggggaaggaggaatggggagttattgtttagtaggtatagagttttaggatgtataaaaatgtgaatgtatttaatgttattgaattgtatatttttaaatggtgaaaatagtgaattttatatgtatattttacgataattaaataataaaaaagaaattgttatagtgtattaaataataatatagaattagaaagaggttggggttttgtttagagagaaaaaaattaaggtttgaggaagggtttttagagaggagtggtgttgaaggcggagtagttatattttaaaagagggtttaggttagaaaatttttataggaggaaggtggtgttgggagaaggtttagaggaggggatgattatagtttattatgtggtaagtgaagattttggatatgaagtttaggaattgatagtttatcggggttaaggaatcgaaagaggatgagggttaaggagtcgttggattagagtttgttttgggtttgggtgggggtgaggagatgggtagggtaaggattaaagggtggtatgagaaggaagggggggtgattttgggagaatttggggtaaagtgagaataggaagggaggggttgtttgggggagggtggggtttggggaaggtgagaatttgttgagggtttaaggtagttggttaagaggtgggaatagtataaggttttaaggtagagaggggtagagggattagggagggatggtttagtatttgagggttttagggtggggtttttaagagggtgaggttgaggatgaaggagtggggaacgggttatttgaggtagggtttagagtaggtatttgtattggaggggaggggtatttgcgttgttttgcgttttgtttaaggtttaatttttattagtattagggttttttttaagtggtttggaggggagtgggatggagggaagatttttttgataaaaggtagtattagaaagttagggttagggatagttgggaatggagaggtataggggtagtattgggtgaaggttgtttataggaaaggtttataagggaggtaggagggacgggagtaggggatgagggtagaggatattttataaatggattagagaattgtagatagaaaggggtagtagggagtagggagggtaataggatttagggggttatgagaaaggaagttgaggaagtaggagggaatttggtgtttttagattattggagtttatagtagttgggagggttgatagagaggaaagaattttgggaacgggaggcgaagggataatgagttggggatgggagtagtcgtaggaagaattttttgtttggagtcggtaggttttaattttttagtttgagagttaggagttttatagtttttatagtaataggaagtattagtttttggtttcgaaaaaaggagggttttaattttagggattgcggttcgttttggagttgagaatacgcggattttagggagaggatagggttttagggattcgagagtcgttttgagtatcgggggatgtgattgttttagcggtagagttggaagggttttcgaatgttatttataggaatagtttaggaatttagggattttagaagggttggtttgttcgaaaagtgagaggaggcggaggagaggtgaggagagtaagtgtaagaagagattagaaagtgtagggggcgggtgatgcgcgatttcgaggaggattgaaaagagattgaaaagtagggttgaggagtggcggtaatcggtagcgtttagttttcgtatttcgttgtatatcgtatttgagtttcgtcgcgatcgtatcgcgttcgttgcgatttattcggattttttagaaacgttaagtcgttttcgttttagtcgagggttagaataattttgttattttagttttttgagtagttgggattataagcgagtgttattacgtttagttgttatttattatttggtattaatttttattagataatgaattatttatgattacgaattgtgttttttttattttcgttagttttacgagtatttttttttttaatggaattttatttatgattattaattattttttaggatttttagtttatatttttttgtagatgaaaatgttatatattatagagttttaataattatttagtttttttatttatatttattgattatttatttcgagtattattatttattgagtataatagggattggggttttgtttttattttagagggattatttatattgttaaaggttataagggtagtgaggggtagagaggaagatggatttagtttttttgatattggttttaagtttttttttttatagtgtttatattttttcgaggattttttttttttgtgttagttttagtaaaggattttatttagtttatttttaagaagatttttaatattttaatgacgatgatattaataataataatatgtaaagtttgttttaacgtatttagaggtgatcgcgataagatatgaagttaatttttttttttttggggtaggggaggtagtgatgattttggattttggatgagtcgttttttagggtttaggtttggttgtttttttttaattaaattttttaggttttttttgtttaaagttttttttttttattttatttttagttttttttgttttgagttattaattacgtttttttttttagtattcgttttagatttttggatttattagtataaaggtgatttttttttcgtagattgtaggcgttattgttgggttcggaaaagaaagagaaaaggtttagcgcggtcgcgtgtgtaatttaggacgcggttgcgttgggcgttcgagcgcgtttttaggattgcggttcggagtttattgcgaggacggggattatttattatttcgttttggtttacggaaaatgataagtgtttattgatatagaaacggaataacggcgttgtgggttggggagggtcgagttgtttttaggtttttggtttttagttgcgcggtatttatatttgtcgttgtgaaaatgtagattcgcggggtaggaatttcgagttcgggttggagcgcgatttggaatttgattcgtttgaaatagtatcgcggtggattcggagtcgggtgagtagggaattgcgttttagttttttttacgggtcgtttattgattttaggattcgaaaacgtttttagttgtttcgttattttaggaaggtagcgtcggtttttgggcggttttggtggaaacgggtttcgtcgttcgtaggaaaatttataattaagggattaggaaaaagttttttagggtcgcgcgtttttagtgaggattttaatttatatttcgagtgtggtttcgttaaagattagagcgaaggttattgaaatgatataagattagcgaggtttagggcgttgtcgtttatagaatgcggagatacggttgtttcgcgttttttttttgatttgttttaggcggacgcggtgacgtgtgtttgtttcgaggttggaatatatggggattaaatgtagagaatggagaaaggagggaaggatggggggatatttcgaggaaaggaagggagagggagaaaaggggagagaaaaggtgaaggtgagaataatatttgaaagatgtagttttattatttttaattttatttttgttttttatttagttttgttatttatgaatatttttattaaagtttttttttttttgtgtgtgaatttgtaaatatacggtttattatttttattttagagtttgcgaggttaagttgtagagaatatgagtttttatttttagatgtgttagggtgtatttcgtgggtgtaagaataagggttttgttttgttttataaaattaaagtataaattttaaatagaataatatttttaaattattattgggatatattttgtatataattagtgtatttatttgaaatgtatagtttattgagttgtattgtttggttgttttatatatttatatatttattattataatgaagataaagaaataatatttttatagttttttaaagaatagttacgcgataaaattttacgtagtttttaaaaagaggaggataaatttgtaagtattgttatgagaagatttgtgtttagtttatttttatttatttttaaaaggacgaggatatatggaattataatattagtaatattatttatataatatatattttaagtaggggaaaatatggaggattattttttaaaattttgatagggattttagggattgggataacgttgtgatttttattttttttgaaatgttggaattttatattatagaataaatttggattttggttaggcgcggtggtttaggtttgtaattttagttttggaagttgaaggatagtttgagtttaggagttcgaggttgtagtgagttatgattttattattatattttagtttgggtgatagtaagagattttgttttagaaataaataaataaaatttaaaaataaaaataataaatttggatttgtgtggtggttaagaaaaaatatttgtttgaaaatattataaagataagttatatatttaaatagttataggattttaaaaattaaagtgttaattaaaatttaattttagaaatttttttttaagggggttttatatttttatgttattaaattttttttaaagtatttttgatagagtcgtttttagtgtagtagagagatgtgtaataattttataaaaggggcgggttgtaataaaaagggaaaggtaaaatttagtgtggatatattgttttatttatttttaaagtacgtttgaaaattgcgttgttatagcgtttttgggttgagataaagtcgaggaaaattttgtttttggagtattgatttttttttttttagggttaaagtttaaaatttagaagtaagtttaaaaatttaggttgatttttagatttgaagaaattttaagaatatttgtgtggaagaatattttatgttaatgggtaggaagaattaatatcgtgaaaatggttatattgtttaagttaatttatagatttaatgttatttttattaagttattaatgattttttttatagaattggaaaaaattattttaaagtttatatggaattaaaaaagagtttgtattattaagttaattttaagttaaaagaataaagttggaggtattacgttatttgattttaaattatattataaggttataataattaaaagagtatggtattggtattaaaatagagatatagattagtggaatagaatagagtttttagaaataatattatatatttataattatttgatttttgataaatttgagaaaaataagtaatggggaaaggattttttatttaataaatggtgttgggaaaattggttatttttatgtagaaagttgaaattggattttttttttatatgttatataaaaattaatttaagatggattaaagatttaaacgttagatttaaaattataaaaattttagaagaaaatttaggtattattatttaggatataggtatgggtaaggattttatgtttaaaatattaaaagtaatggtaataaaagttaaaattgataaatgggatttaattaaattaaagagtttttgtatagtaaaagaaattattattagggtgaataggtaatttataatatgggagaaaatttttgtaatttatttatttgataaagggttaatatttagaatttataatgaattttaataaatgtataagaaaaaaataaataattttattaaaaagtgggtaaaggatatgaatagacgttttttaaaagaagatatttatgtagttaaaagatatatgaaaaaatgtttattattattggttattagagaaatgtaaattaaaattataatgagatattattttatattagttagaatggtaattattaaaaagttaggaaataataggtgttggagaggatgtggagaaataggaatatttttatattgttggtgggattgtaaattagtttaatttttgtggaagttaatgtggcgattttttagggatttaggattagaaatattatttgatttagttattttattattgggtatatatttaaaggattataaattatgttgttataaagatatatgtatacgtatgtttattgcggtattatttataatagtaaagatttgaaattaatttaaatgtttaataatgatagattggattaagaaaatgtggtatatatatattatggaatattatgtagttataaaaaatgatgagtttacgttttttgtaggaatatggatgaaattggaaattattatttttagtaaattatcgtaaggataaaaaattaaatattatatatttttatttatagatgggaattgaataatgagaatatatggatataggaaggggaatattatattttggggtttgttgtggggtggggggagaggggagggatagtattaggagatatatttaatgttagatgacgagttaatggatgtagtatattattatggtatttgtatatatatgtaattaatttgtatattgtgtatatgtattttaaaatttaaagtataataataataataataataataataataataataataataaagattaaaaaaaaaaaagaatgtttgtgcggatagttacgttttaagaatttagtttttttgggttttaagtttaagttttttggggttttatttagtgataatggtcggaaggataggatatagtgaaatggtattagtgagttagaggttaaaggaggatttttggttttagcgcgtaggatgtgttttgttatagtggggttgggatagcggagcggaggtaaggatattttgggaataaatggcgagaaaaagtgcgttagggaggatttaaagtttttagattttttttttttttttttgttgggtgggaggggattaatatggtttttggtggggaggttcgtgggatgtagagaatggggtcgttgtaaaggggcgttgcgcgttttacgtaaggtttttggtattttttttttagttattattgatgagtttaaattagtaggagattaagacgtgttttttgttatgtagattttatattttgtatttcggttggtttattaaatttattttaataaaatataaaaataaagaattaaattttgcgtgtgatatttttgatttttagaaggttttttttttttttatttttcgtgggttttttttttgtttcgtttttttcgttttgtttttatttttttatttttgtttatttttggatttcgtttttgagtatttttttttttttttagaggatttttttttatggagtatagttttttttatttttaggaaaaagagataaagtttattgagaaggaattgagagatttttgttattttatttttgaagttagtttgttttataacgtttatttaggttgtatgtgtgtgtgtgtgtgtgtttgtgtgtgtgtgttcgtgtgtgtgaatttgtgtgtgagagtgtgtttaaatatgtgtgtgaatgtgtgtgcgattgtgtgtgtttgtgtgtattagttagcgtgtgtatttgtatatgagagagagtgtgtgtgtatgtgtgtgtgtgtgtgcgtgaatgagagttaaagtgttaaatttggtatttaggaaatttttttattttggtattgtacgtaggagttagtgttatgtgtatttgtgtttttattttaggagttgagataattgtattaattagatgtgtagagagttaagggttttacgttggaaagtattagagaggagggtgagattggaggagtttttgattttaagttttttgattatttttatatagggattttgaaaaaaaagtgtaggatatttcgtttttttttgggagtgatagggaagttagagttattgtgcgtgttaaattttattaaagaaaaattattatagtaaaatttttatgttatagttttaagtttgtataatgatttaaatagaattaatattaaaaaaataaatttttagtttaggtgaggttagtgaagttggttgttaggtgtaaaggaaattgtaggtataaagaaggatatttgtaggtagggttgtagtttagtcgtttttgtattttagggcgtttggaaaggattgtttttatttaatagtgtagggtgaggatattttgggggagaaatatagattgtttttagatttttggggtttgtatatttattttttgattttttagttgttgattttatttttgaataaattatagttatataaatttgttttgattttaagtgtaaaataggaaaatatttttgaaataggaaataagggttaagtgatttgtattgttatttttttttgtggttttttgatgtaatataattgtgagttaataaatttatggttagggaaatagttaattttatttttgtaaatgttttagatgtttttttttgttgagtaatgttttagttttgttttagttttaatattttaagtttatatttttttagttgtttttttttgttgttgttgttgtttttgagaaggagttttattttgttatttaggttggagtgtagtggtacgatttcggtttattgtaattttcgttttttaggtttaagcgatttttttgttttagtttttttagtagttgggattataggggttcgttattacgtttggttaatttttgtatttttagtagagatggggttttattgtgttggttaggatggttttaattttttgatttcgtgatttgttcgtttcggttttttaaagtgttgggattataggtatgagttattgcgttaggttttgttggtttttaaataatgtatgtatatttattatttggtttgttgtagtaagttatttggaattaattgtggaaataaatgaatggttttttattaaataattgttgagattatttgaaaaatgtattaattttaaaattaattattttatattcgtttattgttttttttttagagttattttttttaggatagtaaattcgacgggttttttagttgggttgtttgttgtattttatgtagttgtttattatttatataataggtagagtgaatttttcgaatgggaattagagtttatttttattattatattttagagatattttagttttttttttttttttttttattttttattagttttttaatacggggtttttttggttattttggttttattttattatttttagtttagattatttatttgtattcgtattagttttttgttattgtttaattttgtttttgttatcggtttttgttggtatttttatatgtatttgttttttagggatttatatggtttattttttatgttattcggttttttgtttaaatgttttttagttaagtttttaggaattttttatttaataaaatatattttttgttatttttattattattaattttttaattcgagtatattttttttataataattattattgatattagaataaatttgaaagttgttgtttgtattattaaaatatattatttgaggttaggattttgtttagttattatttgtatttttagtatttagaatatattagtatagaggaggggtttaataaataagaggtgaatgatgggtgaatataattggtatgttgtttttgataagtaattttataatatgtgtgttcgaggcgggtggattatttgaggttaggagttcgagattagtttgattaatatggtaaaatttcgttttttttaaaaataaaaaaattagttaggtgtggtggtgtacgttagtaattttagttattcgggaggttgagatataagaatgatttgattttgggaggtggaggttgtagtgaatcgagattgtgttattgtattttagttttagtgatagagtgagattttattttaaaaataaagtaaaaaaagtttatgtagtttgattaaataatttatatttgagaaatttgtaattttataatgaaatgtaaaatatagaagaatttttaggtataaggatattaattagatattatttataataaggaagaagaatttgtaaaagaagagtagttgggttattttttggaaatagtatatagttaggaaaagtattgtttaagaagagtttatgataatatataaagttgtttattgataataataaagtttgaaaagtaagatttaaaataatttatatagtgtgattgtattaagttattttgtatagatattatatgtatagaaattaggggtggaaatttagggggtagttgtaaagtatagttttagggtttttttttattgacgtttttgaggttttgttaggtagaggtttattcggatttttttagtggggatataggtgttttttatttttttgttttattatattttttatattttttgtaattgagtagattttattttttaaaagggtaaaatgttgattatgaagttttataatatttgaaatataattttaatgaaaaagtttaaatgttttgttttaatttaggttattttttttttttttagagatagggatttgtttttttatttaggttgtagtgtagtgagttgattatagtttattgtcgttttgagtttttgggtttaagtgattttgttgttttagtttttagagtagttaagattataggaaagttttaaaatgattatttaatttaaaaaaaaaaattgaatagaatatattttattgttttttaggttggttttgaatttttgggtttaagtgatttttttgttttagtttttttagtgttttaggataatatgggtgagttattgtgtttagttttaatttagtttgaagtaaagttttttttttatgttatagggtaaaaattttagttgatggagtttttagaaagaagaaataaattttttttttataatgttttatttatttttgggttataggcgtcggttgaatgataaagttaatattgagaatatgattattttagattattgattgttatttaattttaattttattatatttgagagagtgggatggatttttttttttattatgatttgagtatttgagttttttttattttgaatatttgatatgggtgttttaaaaatgtaggttttgagatttaaagggtatttggttttttgagtaggttttttgtatgcgttatatttattaaggttttataatagtgggaagagtagttatagttagagtttaggtgggtttatattgagggattatttatatttagggtacgttgaggaggggttgaggtgagaatttagtttttgtttaggttttgggtgagaggtgggtaggatagttagttattgagtattattggagttattgtttttttttttttgaagattttatttttgtatatattaaaattttatattttttgtggagtaattttttttttagaaatgtaaatattttttaattttaaagttatttaatattatttatagtgatatcgtagtaggataagtttttaatttttattaaattagttttagagttgtagtttttgtttgttagatatggggttttattttgttatttaggttagaatgtagtggtatgattacggtttattgtagtttcgaatttttcggttttagagatttttttattttagatttttgaatagttgttattagaggtgaacgttataagttttagttaatgttttgtgttttttgtagagatggggttgtgttatgttgtttaggttggtttttaaggtttgggtttaagtgatttgttgtttcggttttttaaagtgttaggattagtatgaagttttatattaggtttgtagttgagtatttggagttaaggtaggaagttgttgtggagtttgtatttagttaatttgaaaggtggttttgaaaggtaaagtgcgattaggtggattttggtggggaagtatagatgtttttggtgagaagagaataagatagatgggaagtttttaaaagtgaatattagtgggttttgtgtttatatagtattgggatttggaagatttttttttatttatttttggtttgtgagtttttattttatttttttgttttttaggttattgtaggaaatttttttatttggtaaatatttattaaatatttattatgtgttaggtattgtgttaaaggagttggggttgaggtaagaggaattaaattttttttgtttttaaggttaagtcgttttgtttaggtagagattagtaaggaaattttttatttatttatttatttatttatttatttatttatttatttatttttttagatagagttttattttgttgttagtaaggaaatttttatataaatggttggtagaatatgtaatttgttttgcggatgtatatgtagattatttgttttgattaaggagttatagaagttttataagatataatatttgagttgcgttttgaggtataaataggagtttgataggtatttaggataggagagtattgtttagaatttaggatatgaattttttttttttaggttaggttaggatttagattaagttgattgaggagttaggtgttttttggtaaggaagtgtgttttatatatgattatttagaagttatagttgtttaatattgagttttgagatagagagagagaggtttgatttgaaatgtagaattttgttgggggttcgttaaaatgtagtttttgatttagtaggtttgaggtagggtttgaaaattgtatttttaataagtttttaggtgatgttaatgttatttgttttaggaatatattttgagaattattattttaaggtaatttatattgatttttaatattagaagagggttgataggtaaaggtataggataaattagattatgtatgggttattttggagagtattttatttaagtttgtagtatttgatttttttgggatttcgggaatggtagatatttaggaaggaattaaatgtggggttatagggtaatttagaggttgagttttatatagtatttggggtttttattattttataagtggtttttatatttttaattttttttattttttatgaaattgatttacgagttttgttttgttgttttgggttgtttgggtttgggatgtgagttttgattatattttttgatttaaatatagggtgattttatatgatatatatttagaatgggtttataatgagaattttttaaatttagtaaatggatttaatcgtgtgttttttaggagaattattaagtgtttttttttttaaatattatatatttgagtttatatggatagtagaggaagttttgagtttgttgaagttataattggtatattggatttcgtagaattttttgtagattgggttttattatttatattaggatttggttaaaattttttttattaaatcggttgtatttgttaagtaattatgtttttattttgatttttaatgaatgaaagatagatatatatataaagaaagatagtgtaatgaaaaagaaaataatatattgaattaaagtgataggaaatatttttgtttgagaagtgatataatttttagatagtttttttttttaattaaggaaggtaagagaattaattttgttaggttttttttttaagttttttattttgaaggatttgattttgtttgttttgtttgttttggaattattttttattttatgttttgatttggtttaaaatttaaaaagttaaaagttttttttttatgttattttattttgataggtagttatttatattagttttttgtttatttttttaaaggtattttatgtatatgtaagttaatttaaatgtatatgtatataattttttttttattttatataaattttagtaaattatatatgtttttttgtattttgttttttttttttatattgtattataaagattattatatgaagaaatattaagagtttagttatatttttgtttgaaatttttatgatatattattgtatatatatgtaatattttaaaaaaaaatagagattgttttttttgagtgcggtgttttttaattagtttttttttgataggtatttggattattttttttagagaataattttgtattatgtaatattatatggaaaagttgtagtgattttatttttatatgtatattttagggaaatttatatatttttgagagtaggaggtaatgttttaggatgtttattgtagtgaggtttataatagagaaaatttaaaggttaatgaagagggaaagagaagaattgtagtatattttttttatggaatattatttattaatgaaagtaaatgaattatttgtatgaatatagatttatgttatagaatatgttaattgaaaaagtaagtaaatgaatgataaaattagttagaaataatttataagaagtttaaaagtaaagttaggtaaggtggtgtatatttgtaattttagtattttgggaggttatggtgggtggatcgtttgagtttaggagtttaagattagtttgggaaatatggtaaaaattttttttttaagaaatataaaaattagttcggtatggtggagtatagttatatttttagttatttgggtggttgaggtaggtgtattatttgagtttgggaggttgaggtatagtgagttgtgtttgtgttattgtatttaagtttgggtgatagagtgaggagatttgttttaaaaaaataagtttaaaagattttaaataaagagattttttaaaatttagtaaaaatataaaggtatatattaaatttaagttatatatttttttgtaatttttgatttgtttagtatagtattgattgaaatatgtgtatattagagttgtgaaaaattaaggttatttatatatatttttattatttttttatgtatattatatatagttaataatattaaaatgtcgttaattgataaatttgggtggtgtttttataaagattttttataattttttatttttttttttagttggaattattttgaattaatgtttgtgaagtgaatttataggaattgagtaaaataagaaaagagttattgagtgtgaggaaagttgtatagaggtatagatagatggagagatgataatattgagtatgttagtgatttttatagtaatagattttttggaggagtgtgagtttgagttagaatgaagaggataaaatataaaagagggatgaaggagtggggattttagggggtaaatatgggattgagtaggttagattgggaagcgtggatggattttaaatatttcgttttaggtttagtatttagagaaagagaaattatgtttatttagttttttttataatttttagagaaattttttgaaatattataaaaaagatatatgaatggttaatagttattagggaaaaatgtaaagtaaaattatagcgagaaattattaagtatttattagaatggttgaaatttaagtgattaataaatataaatgttgttaaggatgtgaaatagttttatttattgtttataagaatataaaatagttattttgaaaattatttttatattatttaataaagttaaataagttagtattttatggttagtatttttatttttaggtatttatttaagtgaaataaagattatgtttaagaatttttgtataataatgtttatagtttatttgtaataataaaaaatcgtgaatatttttaaaatgtataaaaaaattgtgatttagtgatataatgtaatattattagtattaaaaatgaatgaattattgatatatgtaataagttgggtagattatatagatattatattaagtgtaaaaagttaggtataagggaggttatatgggatgaatggatacgtatgaagttttgaaataggaagagttattttattatgatagttattagattaatggttgttggggaaagggggttaatttgaaggtagaaaaatagagaatttcgtgtatttttatagtggtatgggtgttatggttgtatttgttaaaatttattgatgaatttgatatagatttgattattttagtatatgtaaattttataagtttaaaatgtttataataaaaatttaaacgttagtaataaaaaatagtaattgaaaatattagtaataaaatttaataatagattaaaataatatattataattacgtgagttttatatttaggatgtaaggattgtttgatatatgtgaattaaaatatgttatatatcgtattaatagaatgaaggatataaattatattattattttaatagatgtagaaaaagtatttggtgaaattaaatattgttttttaatgagaatttttaaaggagtttttttgataaaggaattaagaatatatattggggaaagaatagttttttaaataaatggtgttgggaaaatgttattagatgtagaagaatgtaattagatttttgttttttattatatataaaaaattaatttaaaagggattgtagatttaaacgtaagatttaatattgtaaaattattagaagaaaatttatgggaaatattagtttaggtaaagattttatggttaagatttttaaagtataggtaaaaaaagtaaaaatagataaatgagattatattaagttaaaaagtttttgtatagtaaaggaaatatttaatagaatgaagtaataatttgttgaatcgtgaaaatatttattaagtatttaattaattagtatatttatttaattagtatattttagattaatatttagaatatataaggaatttaaaaatttggtagtaaaaaatataaataatttaattaaaaagtggataaaggatttgaatagatattttttaagaggaggtatataagtggttagtaggtgtgtgaaaaatatttaatattattaaatattaggaaaatgaaaattaaattataatgagatatattttattttaattttagttaagatggttattattaaaaaataaaaaataatagatgttggtgagtatgtggagaaaggggaatgttatatattgttggtggttatgtaaattagtgtagttattatgggaaatagtagagtgattttttaaaaaaattgaaattattaatagaattattatttgatgtaataattttatttttgagtatttatttaaaggaaatgaagttaatatattaaaagagtatttgtatatttatgtttattgaagtattatttataatagtaaagatgtgaaattaatggtgaatttattaatgggtgaatgaataaagtaattgtagtatatatataatggaatgtaatttagttataaaaaaagagtgaaattttgttagttgtagtaatatggatggaattagaggttatgttaggtgaaatgagttaggtaaggaaatataaatattatatgttgttatttatatgtgtgagttaaagacgttaattttatggaggttgagagtagaatgaaaattattagaggttgggaagaatgtaggggtgggaagatgtagagaggtagattaatgggtataaatgtatagttatataaaaaaaaaaagttttaatgttttatagtatagtaggttaattaaagttaataattatgtatatttaaaatagttagaagagtggattttaaatgtttttaatataaggaaatgatatatgtttgaggtgatggattttttaaatattttgatttgattattttatattttgtgtatgtattaaatgattatatgtgttttataaatatataaaatgttatgtattatttttaaaaaatatttttaaaataaatttaatataatatgggatattttaaaaagtataaaaatatgattatgataaaaattggtaaatattttttttttattaagatttattttgtaagtttaagtagaatgaagtttatatagtattagaagaagtggtttttttgagagaattttttttttagttagaaaggtagaaatagaatttttggagaaagtaagattttggagaattgtatagtatttttttttggggtttggggttatttagatgtagggagggtttattttttgggaaaaattaaacgttggtttttgtttttttttgtttttattgtaagattaaaaattgagaaaattaagagaaagtattaagttaaagggatatatttttttttattttttagaatatttattattaaggatgatttacgttgttatgagacgaattgtgtttttttttaatcgaaatttatatgttggagttttatgttgagaagatagaagtggttatttataagttaaggagagaggttttaggaaaaagtaattttgtagtattttgatttgtatttgtagtttttagaattgtgagataatatatatttattattttatttatttagtatgtggtattttgttatggtagttttagtaaattaaaatagaaatattattttttttattttgttttatgtatgaatatgagattttttaagaatatgaattatttgggattttaaaatatagagtgagttaatggaaaatagatgatatagggttatttttaagtttttgtgggttttttggttattatataaatatggatgtgtttttatttttttttagttttatatagtgtaaaagttgtggatatagaattataaattgtgtttaatttatttgagatattgagtgagttagttttgttttaattttatagaaagatgatgaataattataattattaaattaaagaggttttttggtaggggatggtaggtattatgtttttttttttttttaaagtgtatttttttaaagagttttgtttaggagtaaatgttattattttgtttttttttttcgtattgattatttggttttttttgtattttagtaaggttgttagaatggaggtatttgtttatgatttatagatgaattagaggttttatgagtagagagttttttttgaagttatatagttcgtgagtggtggagtaatgataggtatatgattttttaggtttttagtttagttttttgggtgttatgagaattatagtttttggttttttttatatgtagtttatttttgaatttgagaaggagaatgtattttaggtgattaatagtttttgtttttttgtatttgtttgagaatgattttaaaagatttttaaaggttaattttttggttattaattttattttgtttaggtatggatatggagtaggtgaatattgtttttatttgtgatatgtttgaagattttgagatttacgtgaattaggtaagttttatatatagagggatatttatttttttatttatttattttttgtatttttttatattttatttttttatttttttttttggttgttttttttttttggggttttttagttttaatttttgtttttttttaggtgattagagtaggttggtttggaatagggtttgtgtcggatgagaattgtgttaggatttttagtgatgggtagtattattttaagtttagtgttaggagttatttgttgagatagacgttttttttatagtgagtgttgattttatgaaatttttagtttttttttattttttattgtgtttttaattttattatgtaggttatgggtatttaacgtataatgaataattgattgttttatgttttttggtcgttgatgttgtgttgggacgttttgttgttttttatgtggggtttgtgtttttttttatattatattttttttattacgtttaagtttattttttgaatttaggtagtatattagtatttgtatgtgtgttgtgtgtttttgttttgttttgtttttttatgttttatttttattgtgttatgttttttttttagttgaatagatgtagtaggagattcgtttattttggaatgtgattatttgttttttaggagaggatagtagggtgtgggtgaaggagattttgttgtttttatatttgatagtttttattattttttggttttttttttttgtattagtattattttcgaattattatttttgatcgttagaatttttaatgtaattaaatatgaaatataagtgtatttgtattatgtgtgggtgttttttttttttattgtatttggggtaagattattttagggtatggtttagggtaaatttttgtaaggtttggatgttttgttgtgaggttaaagggggacggattgtagagttttggttttttaattatttgtttattttcggttttttgttggggttttttttgttttatttggtttgagagaggttgggatgtttttgattttggggtttttggtggatggtgcgtagtatttttagggatggagggtgttgtgggtattggtgggaagtttgagtgtttttatttaggtttttttggtgtttttttatttatttttttaaattttagattttgagtattagggtttgggtttttgatttttttttgtttttttagtagggtttggtttagttttagtaattttttagtttgggttagtttagttgtgttgggggtttatggttttggtgagggggagtggtggagggagtattagttagggtagggggttgaggtttttggaatttgtattgtagggtttggttgtaaatgaggaattttatttttttttttttttttttagtttattagtttaaggttttttgtattgagaagtttagggagttttttgttttgggtataggtttttggggggtaaatagagatttttggtttagggagtataattggatattttgaataaggatatggggttattggaaagagaggatcggttgttttttttcgttaagaaataattaattgttagatgagggggaatttttgtttaagggttttgtggattgtgttgttttggagggggtggggagagagagttttgaggtttgagttggggtgtggttgggaaggagttgagagtttagagttggaattaggtaaggagttgtaggggtgagggtggtgtagggtgggatttagaggattttttttgatttttgtgttgattttttttacgttttttatttttatttttggtgttcgttaatatgttggggtgattttatttttttattgtttttggagttgttttatttttttacgtttgttttggggtttttagagtagtatttttgtgagttttggagagttagggattaggagggtaggaggaggtgaagataatagtatcgagagattttggaagagaaaggattatggtagttgaggtagggagtagtttgagttgtttagaagatattaagagttcgttttttttaggttttggttttgttttagtatttggtgttgtataggttttatttttgttttgttttgttgtttttattttttttttagtttggttttagatagaatttagattaatttttgtttttgatgtgaaaaatgattttgttagtttaggtagagtttgttttagagtattggtgtttagttttttataggttttgtgtttgttttttttggtattgggtttttttttatttatttttttgaattggtaaggtaggaattatattattagtttgtagatgaggaaattgattcgtatgggtttatttagtatttatttattgggtaagtgtttgttagggttaattgtgggttagatgtgtttagggttttatagttagttggtggaagggtttggagggtttatatttaggtttatttgatttgaaaatttatattgattttatttaagtattgattttcgatttataatttatgttataaattttattgttatatttaaagaagttgttatagtagtttttagtaattatttttttgattagttaatagttaatattgaggtaagatttttttttagtaaaaagattagtaaaatttttatatttttttttaggatgtttttgtattttatagttatagtagtaatttggtttttttgaggatacgattttttttaaagtttttttatatgggggagtttttttagggatttgtatttttgggtttagaggtgaggtggggtttttgttttttattgtggtttttatattttttttttttttttttttttaaatttttaagttgttagtagattagggttttattttttatgttgtagttattttttttgtgttttaagttattttttttaattttgatttttgtagtttttggtttattgttattttttttagtagtgcgtttttttgatttttggtgattttaatatacgtagatgtggtgggttgagtaatggtttttaaagatgtttaggtttaatcgttggaatatgtgaataggttgtattgtatggtaaaagggatattaattatgtaatgaagattaaggattttaaaatagggagagtattttggattatttgcgtgggtttaattaaattatatgagttattaaaagtagagaaattgttttggttggagttagattttgtagaagaggaaatagaggagaagttggagagaggaggttagacgttttaagtaggaggattggatgtgttttaggcgttatgtgtgagtatttgagagaaaattttaggagttaagggtggtttttaataaggaagtggaaatttttgttttatttgtaaggaagtgaatttagataagaatttgaatgagtttggaagtggatttttttttagtttttaggaaggaatgtaggttttttcgtatattgattttagttttatgagattgtgtggatttgtaatttatatgattgtgatatgataattaggtgttgtttaaagttatttggtttgtggtaatttttatggtagtaatagatatttatatagtagagaagatgtttttgttttttggatttttagattttgtaattttttttttttatgatttttttttttttttgtttgaattttatgtttttgttattttttaggttttattacggttaagaattttagtttttttatatttttaattttatattttttattttttggttatttttttatttatttttttgtaaggtggttataggttttgatgatatagatattattattttattatatgttgtgatgtaatattaatgaattatttattttttatgtgtttgtattttaggtttggagtttattttgtggtatattaattttaataatttttttagtttattgggatttttaattgagtgattttgttatttattttttgttatttatttttggtgtttttttttttttttttttttattttgaattttatagtaaataattttaattttttttttgttttttttttgtattgttatatttatttggtaaaattatatagttggtgggttttatttttgtttatgttgtatttgttttatgagttgtaggaggttggatagtagtatataatatgttgattggtttttttaagattttaaattttatggggagtttttattattgacgtggttagtaattattttttttttacgtggtttatttttagtttttttttggtttgggtgatttttagatattttttttttgtgtttatatatttaattttttttttttatttttattttagttgataattttgttttttattttattgagaaaattgaatatattagaagataattttttcgattttattattgtttgtttatgtatttgtagttgtattatatgttaggtattttattacgggagggattgttgggggttaataattttgtttttagttagagttagttttttttttggtgttttaaatattatttttttttatttatttaaagttgttagtttattaattagtatttttttttatttttattattaattttttttttttttttttattggattattgtggtagttatgagaatgtatattttagttttttagttataggaagtagaatcgatgatgattttagtttttgaagtttgaaatttattgttatatttgttttgattttatatttgttttttgattttttttagttaatgattgaggaaagtagggtagaaattaaggtaggaatattttttttttgaaggttgattgtagttttagggttttttgttttttttattaaattttttttagtttgtatagggtttaggatgtttttagttgaattttttgtttttttttttttattggggtttagagttgtagtgtggtttgatggtttttttagtgttttttgttttttttttgaattttttttataagtatttttttgaataaatttttgtatatttattatcgtattgggttttgttttttaggggattttaattaatttaagcggtatgaagggtgatttatgaaaataggtaaaaatgggaatttgaaataattttgtttattgtttggtaggttaagaggatgttattcgggttggtgggggatatagaaagtttatggtataaggtgtagttgaggtgttgtggtttttttagtgttgagttgagaagatgttttggttaggggaagttatggtaggtgaggtgatagaatgttttatataataatgatgaggttgggggaaatttataaagatagaggagttgggtggttattgtttggttgcgttgatattttataaaaggattatgagaatttgcgggttgttaatagttgttattggttataggtgatagtttttgtagtgttttatggagaggtttttattttttgtagcgaaagggtagatagcgtggaatggtagttgaagatattattacgagggttatagtgttttagatatgtttgatatttagttaaagtaggtttgttataggaaagttagggttttggtggggaaatttgagattttggaaattggaattaggatattcgatgggtgttttttaggattttttgggaatgtagaggaggtttattattatttaataatggtttttattttttacgttggaagatgttgtaaaagttttattttcgtgattttgcgggaattttatttagtagttttgtaggaattagtcgttatttttttataggagtttaaggagtatttttgggattggaatttgagggcgtttgattaagaaattagaattttaggttggatgaataaaaattttttggtttggaggtatttttttaaggtatgggtttgttaaatattttaggattttgataagtggagttaaatttatcgttggggtgaatttatatagattggaaaaaaagatgtttaatttttaataaggtagatatgttttagttgttttggtatatgtaaaggaaggaataacgaggttgagggaagtgggtatggtgaaggtttattagggttatgttttataagagggtttagaggatataattttttattagagttttaggaatatgatggtgaaagggatttgtattattaagtataggggtgttgttttttgtaggttgcgggtgatggtaataaagatggttttagagttgtatttatttatatttttggggagagtgtggttttgaagagatagagaagaagtggtggtagtgatttgaaaaagtagagggtatggttattatggtaattttagagtagtagttaggaggatttaagttgtagggaatgtggggaaggttaatagagggtggtgttttagggttaggataggtagttaataagggcgttgtttgatatttatgataggaatgaaagaattgaggagtaggagggtgaaggtgtttgatttaatataaagttatgattttatttttaatgtttagattttagttaagatttagatttagattttagtgatagaggaggagtttatatttttaggaggaagattttgtaattttgtggaagtatatgttggtataatttttttaattatttggtaaaggaatttatagatatttatttgggtggttgtatattggggaaaggaaatacgtagaattggagggattattgatattgggtgtgagttgatattgatgtttagatgtttatagtatttatgttttttattatagtggggtttatggaggttagggagtaaatttggataaattatggtttataatgggattattgggttaatagatttaacgttggatattttttaattttttgagtgtatgattgatattgttgtattgttaagtggagttatttttatattgggtttttagtttgtggagtaaggatttttattgtgttgaaagttaaacggaaatttttgatattgtttatattttggttaaattaaaaattatagtgtgttttagggtgggttttgtggaagatattgaaagtattatggggtcgtattaatattagagagttgaaggatgtggggtggtgttggggttgtttattgtttttatgtaatttagtaatttgtttttgagggaaattggtaaggtttaaagaatgaatgagattattttaggtttggttaagtaggagttataattgtagtttttatgttgtttggttattattggtagagtaggttaataaagtttcgggtatatagtgtgtcgttgtggatttggtgagtgtatttttttttattttaattagaaagtggatatgggttgggcgtagtagtttatgtttgtaattttagttttgggaggtcgaggtcggtggattatttgaggttaggagttttagattattttggttaatatggtaaaatttcgtttttattaaaaatataaaaattagttaggtattatgttaggtgtttgtaattttagttattcggggggttaaggtaggagaattatttgaatatagaaggtagaggttgtagtgagtcgagattacgttattgtattttagtttaggggataagagtaagattttgttaaaaaagaaaggaaggaaggaaggaaggaaggaagaggatatggagtgatttatatttatgtggaattaacgatatatttatttattgtttgttttagggttattgtaatatttgtgttttttatagtataggtttaagattgtattggatatattgtatattttttaggatattaaattagtatattttattgataattttatgttgattggagtagatgagtagtaggaagaaagtgtattgtagttttttgtaaaatatacgtattttataaggtgaagataaattttatatagttttaaaggtgggtattgaagtgaagttttatgggtgaataagtgttaagtgtttaggggaatgtaggtgtgttttttttaaggtaaaagaaaaattgttgtattttgtatttttattagaagtaaggaagtatattgtttggtgagtttttttgaattataataatattatattttatatttagatattttgttttggtttatagtttaggtgatataggaggatgttagttttaagtggggtttatataggaaaggattttgtagtagatttaggttatggtataagtagttattattttttagatttttggggttggtggtgttagtggtggggaaagatataggatggagttgaattaagtattagtgggagagttatagtggagggtttgggattttggagtaagattatgttatttatagtagagatatatgttttttgttagaagtaatttttagtgttttttgttttgatttaatagaatgtttgattacgggatattaagtaattacggggttttaagtgtttgtgtgatttataaagttatagatggtataggtttaatagtatttattattaggtgaaaatagtttatttgggttgagtttgaattttttgttgatatttatagaaaatatttaagtttgaagtggtattgaattattaaatagataaatggtagttagttagtttttattatgggttagtttaggtttggtaggatgagtgtatgaatggagtaattatagtggtaggtatgaggtttcgtaaggggttagtagtattgatttttttatattaaggtagatttagttgttgttatttttgaatgtttaatttattagtaattgaggtttatgatgtgttttagtggggtattatttttttatatgattatttattaagtaataagttgattatatttagttatttttaatttggaagggttagagttttatttttatagggttaggtatcgattttatgggtgggtttttttgttttgtttttagatatagttagtattattttttgggtgttgttgatatttttggtttgtaggttaggtagtgtttttagtttattatttgtttgaaggatttattttgtagggaaagttttagtgtttttacggttgtgggttttattaattttattattatttgtattatttaggagttgttagttataaggaaggttggataggttttttataggtataatttagtgttagtttggaggaagtattttgaggggtgggtgttattttttaggatatagtgtattgtttgaattagagacgtttttagagttttgtgtttttaataggaagaatatgtgtgtttagaaattaaaaggcggaagtaggtttggttttatgtttaattttttagatttatttaatggggtatttcgtatattttattttttaatattgggttgtgtaggatacgaggttttggtttttaaaggagtgtatttttaaaaggagataaaagatagtttattgaattatatattattttagttattagagaagtttggatagtgtgtgtttagatattatttggtgagaagaagattttttttttttttaggtttaggtaataaatagatttttatttttaggagaaggtatggttgttttatataagggtagaagtgtgtgtggaaattagagatttatttgggagttttttggttttttttgttttattgtaagtgtgagtagaattatttagtaatttagtttgagaggatttgatttttaagggtttagattcgttagggtagaaggtttgagttatatttgtgggtaattttttaaggttttgtttttgtgttttgatatttttagtatattggtgttgaggttttgttttttatgggttgtttttaacgattgatgggttatattagtgatattaaggtaggatatttttaggagataggggatttttttgatggttaattgtagttcgaggatttttttatggttttgtttagtgaagtttttagatgatgtaggtttaggttgataattggattgtaattttgtgagaggttttgagttagaagtatttagggaaattttttttggatttttgattattggaaattgtgggagatgaggaatatttgttgttttgagttgttaagttttatataatttgttatgtatagtaaataattaatatatttttataagataggatgtattattatatgttaatttgtatttgttttaaatttattattattattattattatttttgagatagggttttattttgttatttaggttggagtgtagtggtatgattattatgtattgtagtgtcgattttttgggtttaagggattttttgattttagttttttgagtagttgggattatagttatgaattattatgttaggttaattttttagtttttttgtagagatgagagttttattatgttgtttaggttgattttgaatttttggagttaataagtttgtttttttttgttttttatagtgttaggatggtaggcgtgagttattatttttgtttaatttaattataagatattaaatatgtaatttagttttaaaaggaaaggagaagttttatggttgaagaggatgtattttattatcgtttataatgattattttatttgaattttaatttttaattgtgttttaattaaatataaaaggaagatttattttttgttagagtgattttatgatggttttaataattattttttggttatttatttttttttagttatttaattaattttaatgtaggtgttgttgtgaaggaatttagtagatataataaaggggtttaattagttgattttaggttgggtttatgttgtttggattgttttaattaggagagtttttgaaaggattgggttttttttgagtatagagatttatagtgtgagagggatttagtatgaggggttttttttattgtgggttttgaaaatgaaggggttgtgtaggaaataatattggtgggtattaggaattgagtatagttttttttgttttttatattgatagttagtaaggaatagggattttagttttaaaattgtaagaaagtatattttgttatttttgtataagtttaaaggaggatttaaaatgaagatttagatttgggaagtttggaatagagattttatttatattatgtttagatttttgattaaggtattataaatagataaatgggtgttttttggttaggcgtggtggtgtatttttgtaattttaatatttgaggagttgatataggaggattatttgtagttaggagtgtgagattagtttaggtaatatagtgagatattcgtttttatatttttttttttaattagttgggtgtggtggtatttgtttgtagttttgtttattttgaagattgaggtaggaggattttttgagtttaggagtttgaggttgtagtgagttatgattatgtgattgtattttacgttggatgatagtttttagagattttgtttttaaaaataaataaatgaatataataaataaaaataaataaataaatataataaatgggtgttgtttaaagttaatgtttgtgataattttttatatagttttataaaatttatatataggtttaatagattaatggaatgaattgatgaattgatatatatattagttatataaaataaaatttttttgaatttttttagtgttttgtattttataattatttgtgatgtaatttaatatatttatattttatttatttagttaataaaaattaatttagtttttataatgaattaggtatttttttatatgtttacgtgtttgatattttagaagttttataagattaaggtggagttattggagtgttttaggtggagaaatgatatattttgatttatattagtaggattattatggagagaatagttacgtagtaggtaacgggagagtgttagtgttataatttaggagtgatagtgtgatggggattaaggggagaggaggggttgagtgataagagggacggagggaagggttggagaagtagtaggtgaggaaaaggagtagagggatagaatttaaaagtagtataatttttaggtttgaatattttttttaatggtattttaatagatttatttatagagtttcgtagggtgttatttgtagttggtttttaatattttaagtgggtttgtttaaaaattaattgtttttatgttaattaggttttaaaaatattaagtgtttttaagaaatatatatattatttagatgtggatattttttaaaaataggtagtgtatgagtattggtgatggatattgtgattgtatcgagcgtttgtaattttgaggtgaatgaagtttgtattgatttttggttgtaatatataggaatatagtggttattttgtattgaggagatgttttggatttatagaaatttagggttatggaataaaggtaaatttaaaatattataagcgggagttatagatattttgtttgtaaaagtgaaatttaggagttttgtgagttttgttgtaatgtttttagatattttatatattaaggggttaaagttatatgtttttatcgattagatttttgattatttaggggttattaagattttgttatttattgtagttaatatataaaaagtaaattggtttttatattattttatgtatttaggtataatttttttagatttaaagaaaaagaaaaaagaaataaaagaaaaaaatttttgtttttatatttttatttttagggagagttttttttttggtattaagttttttggggtgagttttttttttgaagagtttaggagaataggtaagtagtggggaagtagggagtttattttagggataggaattttcggatgaaaagtgaaaggagagggacggggtttaagttgagggtttttttttggtttttcggatagtttttggattaagatttagggaatattgagatagagcgtttgttataggaggagcggggttagggcgaagttttagagttttaggtatggtttttagggttttaggtttcgaaggcggtgtatgggttggggaggtgtagtattggggattttttattttcgtagagtttttttttttttttttttagtttgcgacgggtttttttttttggatatttacgacgcggatttagtttttatttttattgagtgtcgggtttttagggaagttaattagcgtcgcgcggtttcggttttaaagtttttacgtatttatcgggattcggagtttttttagacgtcgacgatggggttatggcgtttcgaattttttttttgttgttttcggggattttggttttggtcgagatttgggcgggtgagtgcggggttaggagggaaacggtttttgtcgtgaggagcgaaaggtttatttggttggggcgtaggattcggggagtcgcgtcgggaggagggtcgggcgggttttagttttttttcgtttttaggtttttattttatgaggtattttagtatcgtcgttttttggtcgggtcgcggggagtttagttttattgtcgtgggttacgtggacgatacgtagttcgtgcgggtcgatagtgacgtcgtgagtttgaggatgaagacgcgggcgcggtgggtggagtaggaggggtcggagtattgggatttatagatattgggcgttaaggtttaggtatagattgatcgagtgaatttgcggattttgtttcgttattataattagagcgaggcgggtgagtgatttcggttcggggcgtagattatttatttttcgttttatgttttacggacggttttggttttttgagttttcgggtttaagatcgatttcgaggttgcgggatttgtagagattttcgattcgggagagttttaggcgtttttatttggttttatttttagttgaggttaaaattttcgtaggttgttagggttcgggttagggttcggtgggcggggttgatcgcgggaattgggttagggtattatattttttagggaatgtttggttgcgatttggggttcgacgggcgtttttttcgcgggtatgagtagtatgtttacgacggtaaggattatatcgttttgaacgaggatttgcgtttttggatcgtcgcggatatcgcggtttagattatttagcgtaagtatgaggcggttaatgtggttgagtaaaggagagtttatttggagggtatttgtatggagtggtttcgtagatatttggagaacgggaaggagacgttgtagcgcgcgggtattaggggttatggggagtttgttcgattttttgtagatttttcgggttggtttcgtataaggaggggaagaaaatggaaatattattagaatatcgtttttttttttgttttgacggagaggaatttttttgggtttttagattttgtattagagattgattttgagggtttattttgttttttttgggataattaagggatgaagtttttgagggagtggaggggaagataatttttggaagattgattcgcggtttttttttattttatagtaattttgggtattaggattttttttttcgggttttgttttttgttttatatttaatgtgtcggagtttgattttagtttttttgagttttttggtttttatttagattaggattagaagtttttgttattttgtttagagattagaattttttaaggaataggagattattttaggcgtttgtgtttaggttggtgtttgggttttgtgtttttttttttattttaggtgttttatttattaggatggttatatgggcgttgttggggtgttttatgaggaatgtaaagtgtttgagtttttcgatttttttttttagattttttttaagatatacgtgatttatttttttttttgaatatgaggtataacgaggttttgggttttgggtttttattttgcggagattatattgatttggtagcgggatggggaggattagatttaggatatggagttcgtggagattaggtttataggggatggaattttttagaagtgggcggttgtggtagtgttttttggagaggaatagagatatatatgttatgtgtagtataaggggttgtttaagttttttattttgagatggggtaaggagagagatgggggcggttatgttttttagggaaagtaggagtttttttggagatttttagtagggtcggggttgggttttggaggttagaatttttatatttttttttttttttagagttttttttttagtttattatttttattgtgggtattattgttggtttggttttttttggagttgtggttattggagttgtggttattgttgtgatgtggaggaagaagagtttaggtggggaaggggtgaggagtcgggtttgagtttttttgttttattgggggttttaagttttaggtagaaatgtgttttgtttggttatcgggaagtattatttatatttatgggtttatttagtttgggttttgtgtgttagtatttatttttttgtaagtatttgtgataatgaaggatagattttttattttgatgattgtagtgatggggatttgattttagtaattataggttaggggaaggtttttgttgaggatagattttaggagggtagttggtttaggatttatatttgttttttttgttttttttgattttgtttttggtttgtagttatatatttttggaaatttttcgaggttttaagattaggaggtttttttaggattttatggttttgttatttttttggttttttataggacgtttttttttcgtagatagaaaaggagggagttatttttaggttgtaagtaagtatgaaggaggttgatttttgagatttttgggatattgtggttgggagtttatgggggagtttatttattttataattttttttttagttatattttttgtgggatttgattaggttttgtttttgttttattttaggtagttaaagtgtttagggttttgatgtgttttttacggtttgtaaagttgagattttggggaggttgatgtgtgtgggttgttggggtaatagtggatatagttgtgttatggggtttttttgatttggatgtatttagtatatgatgggttgttgaaggtgtgattttttattgtgagtgatatgaatttgtttatgaatattttttttatagtgtgagatagttgttttgtgtgggattgagaggtaagatttgtttatgttttttttttgtgattttaagaattttgatttttttttttgtaaaggtatttgaatgtgtttgtgtttttataggtataatgtgaggtggtggggagattagtttatattcgtgtttattatgattttgttttttatattgatttatatttttttttcgattattttttttgttttagagaagtggtgttgggatgtttttatttttgttttaattttatggtgtattgagttgtaattttttatttttttattaaaattagaatttgagtataaatttattttttttaaattatttttatgacgggttgatgggttaattaaaggagaagatttttaaaatttgagagataaaataaatggaagatatgagaattttttagagtttacgtgttttttgtgttgatttgttgtaggggaggagagtagatggggttgtgtttagtgtgtgtttaggttattatgggttttatgtggttatagtttatttgggttatttttgttgttttattgtttttggttttttagtagaattttgttttattaggatttgtgattatagggatttggatgttatttagggtggtttttatatatcgaagttttttcggtatgaagagataaatttttagttttttgtattttttgttttttttttaggttttttttttggattgtattttttatttttttttttagtttttttaaaggaagtagattttgaaatttgtagagaggaggggttttatagttttttatcgtaggtaattttttgttggaattttttttttgtttttttatttttttttttgtttgagttgtagtaattttagtgttggttttaatttaaatttatgtatttataaagtagagtttgatttagatttatatggggttggaaaattggatttataaggttaggattattttttttgaatagaaaaatatggttgtgcgttgtagtgtgtaggagggttggtgtgggaggaggtgggaaggatatataagtagttttggtgagaaaagtattggtagtattgatgttggtgtgagatgatgttgttttttagttacgttaataaagatattgtttttagaatatagaggtgttttatagtgattatttatttaattgatatttgttgtttgttaggtatatgattgtttttgtatttagaaaatattattaaagtaaaaatagaaaaatttttggttttgtggtgtatacgttttagatgtaagtttgtttaatttgtagttttcgggttgcgtgtggttcgggatagttttgaatgtaagaagtttttttgtttatttgtggtagtaaatattatgaaaattatgtacgtatatgttttttttttttttattttttttgtttattagttgttattagtgtattttatgtgtggtttaagataatgtttattttttttaattggtttagggaagttaaaaaattggatatttttgtaggtagatgatagatatagtataagtagagtaggaatagaaaatgtttgagttagaaggtggtaagtgttgtgtggtaggtgatttagagggtgggttgtggggataggaaggtggttgttgtgttgggtggttagtatgggttttgttgtaaatgtgattttggagtaaagatttgagggatgtgaggagttgtttataaggatgtttgggaaagttttttttaggtaggggaatttttagtgtagatgtattagggtaggaaattgtttgtgtttttggaaggaggaagaggttagaagggttggatatagagaaattgaagtgaggttaaaggtgtggttagagtaggtagttttgaagggtgtgggaagggtgttgatttttgttttgaatgatatggggaggatagttttgaaaagtgggatatggtagggtttattttttgaaagtttttttttggttgttgtgttgagaatagaattgagaggtggggaattagtgatgtagtggggaaaatggtgggaaaggagtatagtattttaggatggatacgttgtttattttgattagggtgtgagtaggggaaatagtgagaagtgaagggattttggatgaatttgaagatggatttatagtatttgttaatggatgtgagaagaagaattaaggatatttatagtattggattgagtgagtagaagggtggagttgttgttagtggagatagggagattttggtaggagtatatagaggagagggtatcgtaggtatttaatggaggagatatttatgaggaatgtaggtgaggggtttagatgtttttgtagttatagatttattatttaattatttttttatttttattatttttgtgttttagagttagagtattgatttttttttgggttgtgggtataggtaggtgaaagttagggaagttgtggtttgttattggttataataagttatagattattatgtttttttagataattaaagaaataataagagaatgtgtaattaggatatttagaagattataataatgtaaaggtttttatttatttaaagaaggtaatataagaaaaatagttgagtaagaaagagataatattagaaggtagtaaatgataatggatagatttaaatttaatgaggttaataattatattaaatataatggatttagatattttaattataagataaatagtgtaggggggtaaaaataaataattaaataaataattatgggttgtttataaaagatataattttagtagaaggtaaagaaaagttgaaagtaaaaggatagagaatattagataaatatttatgaaagattatatggagacgttatttagaaaaattataggatatgagttttttgagatatagagtatacgtagatagtttataaggtttttttttttttttttagagatagggtttgttgtttaggttgaaatgtaatggtgatattatattttattgtaattttaaatttttgggttggagtaatttttttgttttagtttttcgagtagttaggattataagtttgtgtcgttatatttggttataatgttttatttttttatttgttgtggtgtgaataaggaaataatattatgttatgtatttgatttgtagtaggtatataataaatgttaggtgaattaagaaataaaattatttagtaatttaagttatatttatatttatattttatagatgaggagtaatattttagataagtaaagtaaaataaattgatttatattatttagagtagaatcgagaatatattttttgtgttaaaggaattagagttttattaggggttatagtagatattatgtaagttatatatgttaattattagaataggaattgatatattttaagatatattaaataaagggtttggaaggattaattgaatgtagaaatagaggaagaaaatggatttgtttaaaagatggttagaatttttaaagaaataatatttttttaaagtggttttatgtggattaaagtagagatgaatttaagtgttaggtgggaaaatgtttaagtgtagtttttagatttaagggagatttaaaaattttgggatattttcggttgttatatggggattggtgggagggggtgagtggggtgttgttggtaaattttttataatgtataggatagattattttataagattttttgttttaaattgttaatagtgttgttgttgagaaattcgttttagaggtaaatgttgtaatgtttttattattttatagattaagaaattgaggtattagggggagaagtgttagtaagatttgagttgtaggttgaatttaggttatttggttatagggttttggtttttttggttaagttagggatttagtagtcgattataaataattttagttgtacggtgtttttatggtttgtgggcgtttttatggtttgtggcgttttttggtgttgatattgggtttgtggttaaatgaggtttgagggaaaaggaaaaaataggtttgggtagggggatatttttttaggttttttagatttttagttacgatttacgtttagaaaaaataatgtttattttaattatttttttaattttgtttttttttgtttcggttagtttttttttttgattttattaatatcggtatttgttagacgtttattatttattatgtaaggagtgaaaaggttttaggattaaatgataagacgaggttttattttagttatttttttttttttagagttttagttttgtgtttttagtgtttaggtttttaatttggggtttaggaatttatttttttatgatattgcgtgaagaagtgatgttatacgtatatatgattttattataggatattggatattaatatttattagattagttagaggtttaagatattattttttttttaatagtttgtgattttttgaattaaagaaagggtagggattgagggaggttttaattttaaattttttattatttttagcgaagtgttgagaagaagtgtaaggtatttaatttgttttggggatatagtaggaaagtagagtgtttacggattttatattttattaaagaaaatttattttgataaaatatttaagttatttttttaagttttaggtagtagtttaaataaataatattaaaaaaattaaaattttggtttaggtgaaattattgaagttataaaattttgtgagatttgtagttagagagaaggataatttagtttagggttgtagtagaaaatttttatattatattgtgtttttttttattatgaaggttttttgaagggattttttttttttagtagtgtatagtgaggttattttcgtgtaaaaagatagaattttttgggatttttgatgtttatatttattatttatttttttattttgtagatgttaattttatattagatattttttagttaatttttttattttgtttaagtagaatatttaaatttttttttgaagtagaaaattagggattggttatgtgagttattattttattttgtggtttttttaagtaataagtataagagattgtgggttaatagaatttgtagtaaggtaaatataattttttattttagtttatgttttagtttgtttagtgatgttttagttttgttttagttttaatattttaaaatttataattttatttgaatatgattttataagaagttatatatatttatttttgttgagtttgttagtgaaagtttttttaaaataattgtgaagtaaagataggtaaataaatgtatggtgtttttatgtattaatgtttattgtattttataaatgtgttagttttattgtaatagatggtgtattaataaatggtgttggaaatttggatattaatatgtaaaagaatgatgttggaaaaaatttatgtttttttattatattttttttaaaaattaagttagaatgatttaaagaattaattttaagaattgaatttgtaaaatttttaagaaaatattgaggaaaattttatggatattagaattggtagtggttttttggttggtgattaatagtataagtaatataagaaaaatgataaattagaatgtattaaaatttaaaaatttttttgtattaaaggatattattaagagaattaaaagaaaatgtatagattaggaggaaatatttgttaattatatatttgataaagaattaatatttagaatatgtaaagaattataatttaataatagtaaaataattttatttaaaaataagtaaaagatatgaatagataattttttaaagaagatatataataaggatataaaaataaggaatgttggttaggtatggtggtttatgtttgtaattttagtattttgggaggtcgaggtgggcggattacgaggttaagagattaagattatttcggttaatatggtgaaatttcgtttgtattaaaaaaatataaatattagttgggtatggtggtaggtatttgtagttttagttatttaggaggttgaggtaggagaattatttgaatttgggaagtggaggttatagcgagtcgagattgtgttattgtattttagtttggtaatagagtaagattttgttttataaaaaaaaaaaaaaaaggaatgttaataaggatataaaaatatggtaaattttattaggttaagtgttggtgaagatatggagaaattggaatatttgtatattgttggtgagagtatatagtggtgtagttattatggaaaatagaatagtgattttttaagaaagtaaaaatagaattattatatgagttaataattttatttttgggtatatttaaaagaattgaaagtaggaatttatttagatatgtgtatatttaggtttatagtagtattatatttaatatttaaaaggtggaagtaatcgagtgtttattagaggatgattggataaataatttacggtgtatataagtatggaatattatttagttttaaaagtgaatgaaattttaattggatgagttttgaaaatattataagtgaaataagttagaaataaaaataaatatgatattttatttatataaagtagttagaataagtaaatttatagaaatagaaaatagaatagagattattaggggttgggggtagggagaatgggtagttatggtttaatgggtatagtttttgtttgggatgatgaaaatgttttggaaatggatattggcggtggttatataatattgtaaatgtgtttattgttattaaattgtatattgaaaaaatggttagaaggtaaattatatagtatgtatgttttattataatttataaaaaatatattaatattaaatttaattatagtttttatcgagtttttttatattggtgttttaataagtatattgtcgttgtggaggggaggggtttttggagtttttatgttattatgttttttggtgttattttttagtataattttggtggttagagtataatttggttttatatattttaaggggatatgagatagtgattaatatatgtaagttaaagattgatttcgtttggaaaggcgggataattcgaagtaaggagggggtttttaggttatagatagatgagagataaatggttgtatttttttgagttttcgattagtttttttaaatgagggaattagatatgtgtttattttagtgagtagaggggcgattttgaatagatgggaggtaggtttattttaagtagtttttagtttgatttttttttttagtttagtaattttggggttttaagattttattttttttttatagaattattaatatttatagaaaaaaaaaaattttgaatgtatataaatttttatattaaattattaatttatagaaaatataggtaatagaaatatattaaattatattttggcgtgtaatttataaaatgtaaataataggaaattttattatataatataaattttaaggagaaatttatggaataaatgagaataaaaaatatatttttaaaggtaaaattaaattataattttggatgatgaaaatataaagtttagtatagggaagtagtttttttagaattttagttataattaatggaagggtattgaaatttgttattttttagttgaataataggttttggggatatagaaggttttgttataagttgaatttataattgttgtttttttggtattagggagaataggttttttattaaggattgggtaggagtgtttgttaggtttgtattagttattgtttaagtttttattttataaaagtgttatgtatatatgtaataatatagtgttttttttatgtattttttaagagatgaattgtatgttattttagggttagtatattatgagtttagtgttgtttttattgtggagtttttataggagatgtttttaatggtatatgaaggtatggtttttatttttgataatgtttggtatttagatgtattgagttaaggtaattttgtgtatggatagtagtagttgtataattatagatagtatttggtttgagatgggaatgtaatagagtagttaatgggtagaattttaagttatatggttggtttgtattcgtgagttattatttatagttttttgtatagatagtttggtagtatttaagggttttataatttggtttgtttaaagggtttgagatgattggtatataatttaaaaatttttatggggagttgatatgtggaaagatatttggaaaagtttataggaatttattgtggatttaattgttttagtatattggttagatttattttttagaaatatggaggtagatattttagtaaaaattagaatattgagttagttgattaggtatatattatagtggggattttagtgtatgaatgggttgttaaatagtaaagggagtaggattggttttttgttatgtagatttagtggtggcggtagtaaattgtttaatttgttttcgtttgtatttttgttatattttatatatatttggatatatatataagatagttatttttgtgatagattggtagatagattatattagatttttgttagtaattttgagacgaaagtatgtattaatatgtgtatatattgttatgggattgttgtaagtttttttttgtaagagtaaattaaatagttattattaggggtttggagtaatttagtgttatgtaaggatattttttatatattgatagtaatcgaggtatgtattttattagatacggtgtttaagattggatgtatgaaagggatatagattgggtattttatttattgtatatttttttaagtaatagggttgattgaaaggaaaaatggtattttgaaggtatagttttgagtatttttaaaatttaatattttttatagttagataaagattttgttttaagttattagaaattttaatttagttgagataaatatggtgttggtattatattaatgatttaggattattatagagatggatttattaattataatagtaaagaaagtttaattagatgtatttttgatttgagtagataaaaggttaatggtaaaggttatttagaattttttaagattttgagttagggaggagatatttgaatgggggttggattagtaattttttttatgttggatagagtatttttttttagatagtaaggaattttttattaattaaagtggtttttattgattttgttgaagtttgggttaaaatattttatatattaataaattggaatatagttttttttaagaagtattttggttggttatttgatatggttttttgttgtttttgtaattttatatataatattagcgtttttgttttttaggtaatatgtttggtgtgtatttttagtttataattttatgtttttaattaatagagatggagttattagtaattttgtttaatggggaagaattgttttattaaatatttattaaatatttttaattttatttatagttttttgtttttattgttgttttgttttatattttttggtttggtttttgaataaatatggtaaagggtatttttaattttgtgttttatatttggtatatatattatcgtttgttgtttgtgttgttgttgtggtttttgtttaataagtagaaaataaattgataaaatgtgttatttatattattaaaatgttatttatagttttttttgaaggtttagggattatgggggaaatgtgagtttatgagattgtaagagttggattagagggttgggatgtggagagaaaagtgatttttttttggatgttaattttttatgttgatttttgattagttttagttttaggattgatttttgatttttattttatttattatttttattgtaagaatatgttaattttgatgttatataaattttaggttatgatatattagtatttttatttgttttggatagtagtagtttttgttttgtatagagtatgtatattttttttttgtggtatataagttttgggtgtgggggtaataagtgtagaaatttatttgttttgttgttatttaagattacgtttttgtttgtaagttttttaataaaatattttttattgataattagatttgtttgttttgttttttggtttattggtttttttggtatttggggggtattttgtatagatggtttttttatggaatagagggtttgtgtggggttgggagtttaagttagtatttgtagttagagtttagaatatgtgttgaggagatagagttagatttgttagtagagatagatttgttagcggagtggatagttgggttagtaggtttgaagtaacgttatggaagagtaggttagtaatagttgaagagttttagaaatttttatttttaataaggttattttttttaagagggattattgttgtattatagtatatagttgtttttgtttggttgttttagtaaatatgtagtatttgggggtatttatattattggaatagtagttatgagaagagtttattgtgttagtttaattgtatttaattgtataatgagaatatggggattagtgtgttttgttatttttttgtttagtatttttgatatatttgttttatataggtattatgtggtatcgtggtgtgtgtttgtgttattttgaattatatttgggtatttattggaaggttttttcgggattgttgtgatattaattatattatggattgatttttgttagaaggtaataaaggggtaagggatagtatttttagtttaagttttggaatgtgcgtggtattaaattgttttgtatttgtgagtaggaatataattgttggataatagatattttattagttaatagaaattgtgattggttttaaagaaaatgggttttttttggttttgggaatataagatttagtagtatagaaatagaaatggttgtaggtggaggaagtattttcgtcggagttaggaaagtatgaataatataaaatttttagttttttttttttttttttttttgagttttttgtatttttgttgtagtagtgatggtagtagtgtggagaatatagttttagggaataattaaggtttaggattattagtaaaggttatgagaaattatgattttttttagaaaaaaaaaaaagggaaatgagagtgtttaaggttttaggagagggttggtgtaggtttggggcgtagtaaattttttagtttgtttagatttattatgttaagtggggaggttgtttgggttagattatattaaaggatagtatttttatttttttttagaggttttagaatgtttattgattgtggttttagtggtttttgaatagaaatttggtaatatgaagagtagtagatgttggtatggtaagattataaatgtgtattagaagaattattttgtgggtaatagaaaaaataatatataaagaaataagttaatattatgagaatgttattagttaaatttagaatgtggattattttataggataagtaatttggtttttttggggaaatagaagtataggagagttagggtgatattattttaaagttaattttattttttaattagtaaggtatattttttgttagttataatttatggttataagaggtttatagttgattaaataatttaataatgtttgtaagaataaacgtttatgatagataatagaatgtttatatgttttgacgttatattataatatatgtttttaagattattatagttatgttttgatatattaattaaaatgttaaggataattttttttaaattaataggttttaaattttgttatgttgttagagtatttatatatagatatttaatttagtttttatgtagattaaatttttatattagaagagtttataataaagatggtgtatttttttttttgttttttgaggatatttattttgtatttgagtaatttttaataaattattttttttttattgtattttgtgatttatttttaatttttttttgtgtaagatttaagaatatttttttggggtcgggatcgggatttgtttttttggtaatagtttttttaataaattaaagttttgagaaaaaaaaaataggtagggtgggtggtatggtatagaagaatagagaataatgagatataagaagtaattgtaatgtgtggattttttttagtttttgttttagatagattaattgaaaaagataagatagatatttgaatatgtattgattgtttagtaaaattagagaattgttgttaattttgttagtgtgagaatagtatggttttatgttttttaaaaattttattttgtgaaagatgtatgttgaattatttaattgtgaaattgtatgtaaaggatttgtttttataattttttagagatgagtttataatgatataaatgatgtgataaataaattaatggaggagaggaggtaaaattttttttgtagaagaattttaaataaggtaggtagatattttgtttttaaaggaatagtattaatttttttttttggaagtgtgaatttttgatattatgtaatgaaaatggtattttatttgtggttttttttttttcgaatttataatttttatttattatgaaaaaaaaaaaaaaataaaaaaaaaatatcgaattttaatagaggaatattttataaaatatttaattagtattttttaataacgtttaggttattaaaaataaggaaaatttgaggaattgttatagttaagaggagtttaaggaggtatgataattttatgtaatagggtattttgaatgggattttggagtagaaaaatattattaggtaaaatttaaggatatttgagtaatgtatgatttttggttaaaaataatgtattaatattggtttaataattgtaagaaatgaattatattaatgttagatgttaataataggagaaataattttttaatttttttgtagttaaaattgttttagaattgaagtttattttttaaaatttttttggaaaaaagtggaaatatatgaaatatgatggataaatgttagtaattattgaatgtgatgatggataatgagaatttattatataattttgtttttgtgtatttgaagttttttataatggaaagtttgaggttgggtatagtggtttaaatttataattttagtattttgggaggttaagagtttaagattagtttgggtaatgtagtgagattttatttttattaaaaaatagaagaattagttaggtgtggtgggtttgtatttgtagttttagttatttaggaggttgaggtgagaggattatttgagtttagaaggttaaggttgtagtgagttatgatgttattgtattttagtttaggtgatagagagaaattttgtttttaaaaataaaaaataaaaaaagtttgaataagaaataaagaaatatggagataaggataagaagaagttatttaaagtattagagtagttgtttttttaaattatggttaaaaaaatatataataaaatttattattttgttatttttaagtgtatagttttatgatattaagtatatttatgttgtgtaattattattattttttatttttagaatttttttatttttttaaattaaatgttaggtttattaagtaatatttttttattttttttttttttttagtttttgataatttttattttatattttgtttatgaattttattaaattaggtgaattatgtaagtggatttatataatattttttttttttagtttgatttatttaatttagttttatgtttttaaggtttatatataatataggaaaataattttttttttttttttgaaaaatattttattgtatggatttattatattttgtttatttatcgatggatgtatattttgttgtttttattttttggtagttgtgaataatgttgttataaatatgatgtataaatatttgtttggtttttgttttaattttttttgggtttgtatttagaagaggaattgttggattatatgttaattttatgtttaattttttgaagaataaaaagtggtcgtttttataaaatagaaatttttagattaggagatgtgggatagggaaaaatttttgtttttgaaaagttaagagtttttattataagttttgtagaattatttttaaataatatatgataaaaatgaagtaaagtatgtaataaaatttattttgtgttaagtattggagatatatggagggagtttttagttttttgggggaagaatttggttatagaatagtgtgattataggtgtaatatagagaagattttaggggtaagtatagaaaatagttattaagggagattttttgtacgttatgtagaagtgttttataggaggtgacgtgggagtgaaggaggaaaatatgatattttgagttggagaattggaagattaaatttggaatgatgttagtattgagattttgggattatattgtataattggttttattttagtattaatattgtgaaattttattttttttatgtttttaaattgtggttttatatttagtttttatatttttttttgattaaattttaaaattaaaattggttttgattttaggggaggtgtttttttgattttttttttttgaattttatagtttgatattttttttttattttgaagattatatttaggagggattttaggaattttgtattttagtatgtgaggttttaggttaaggggtgttaatttgattttgaaagattttatttgtttttagtgttataaggttttgatgaaatgtttagtatttttgtggaaatttaagtgtttttatatagtattatatgttttggagattatgtatatgaaaagttttatagataggtgtgttttagtgatgttgtgtagagtaatttgtggtttaagttaagttagaaaatgtttttgattttatattttttaaaaatgtaagttttaaaatttggttatggatgggaaaatattatataattgaaaggataaatataagtatgttaattagttaaaaatattgtaaatgtttaatgtagatttaagtttttttttaaaaattgttaataaattaatagtgtagtttataaatgatgaaaagagttgagacgtttaaaaaaattttttaagtgttaggttttggtattttatatttattttattttttaatttttatattaggttaaagtttattttatgtttttaagatttagatgtaatattgggaatgagaaaggttaatataagtgatatgtttaggattatatttttagtaattatagtttattgatggagagaatattaaaatttgtttggtttttatttaaaaataaataatatttgtgttatagaagtaagatttttttagttataagttaataattttaaagaaaagatttaatatgtaaatttatttggaaaggttaggggtgaggttgtttagagatatgattagattcggagatatatttgttattagatttttttgtatttttaaagaagatagttaatattagtttattagttttaattttttttatattattttattttaatagttttagtagaaaaatagatattttttttataatgtttataaataaagaattagagaagatgatttttggattaatatttgttgttatggagatgtggtatagtgtgggaaattttgattggttagggttgggttatgttatttttttattttttggtttattatattattttttaagttatttaaagttatggttattatttttatttattttaattgatataattatatatattgatatagtatagtgtgatattttgatatatgtatataatgtgtaataagtaaataagggtatttagtttatgtattatattaaacgtttattatttttttgtgatggaaatatttaaaattatattaaaaagataatttattataattaagtgggttttatattagggaagaagggatggttgaatatatttaagttaataaatgtgatatattatataaatataattaaaaataaaaattatatgattattttaatagatgtaaaaaaaatatttaataaaatttggtattttttatgattaaagtttttagtaaaatcggtatataaggaatatattttaatgtaattaaagttatttatgagaaatttatagttaatataatattgagtggggaaaagttgaaagtattttttttgagaattggaataagataatgatgtttatttttattatttttttttaatatagttttgaaagttttagttagagtagttagataagggaaagaaataaaggttatttaaatcggtaaagaggaagttaaattgttattgtttgttgatatgattgtatatttaggaaattttaaagatttttttaaaaagtttttaaaattgatataaaaattttgtaatatttttggatataaaattaatgtatataaattagtagtttttttatattttaatagtgattaggttgagaattaaattaagaatttaattttttttacgatagttgtaaaaaaaaaaaaaaaaaaataaatttagaaatatatttagtttaaggaggtgaaagatttttataaggaaaattataaaattttgttgaaagaaattatagatgatataagtaaatggaaatatattttatgtttacggatgggtagaattaatattgtgaaaattattatattattaaaagaaatttataaatttaatgtaatttttattaaaatattacgaatattttttatagaattagaaaaaaaattttaaaatttatataaaatttaaaaaaagtttgtatagtaaaagcgagattaagtaaaaagaataaattttgaggtattatattatttgattttaaattatattataaggttaaagttattaaaatagtatggtattggtatgaaaatgggtttatagattaatggaataaaatagagaatttagaaatgaatttaaatatttatagttaattgtttttcgataaagtaaataaaaatattaagtggggaaaggatattttattgaataaatggtgttgggataattggttagttatatgtaggagaatgaaattggatttttaatttttattttatataaaaattaattaagatggattaagtatttaaaattaagatttgaaattatataaattttagaagataatattgaaaaaaattttttagatattggtttaggtaaggattttatgattaagaatttaaaagtaaaatgtaataaaaataaagataaatagttgggatttaatgaaattaaagagtgtttgtacggtaaaagaatagttagtagagtaaatagataatttatagagtgggagaaaatttttataatttatgtatttgataaaggattaatatttagaatttataataaatttatataaattagtaagaaaaagaataaataattttattaaaaagtgggttaaggatatgagtagataatttttaaaagaagatatatagttggttaataaatatatgaaaaaatgtttaatattattaatgattagggaaacgtaaattaaaacgttaatgtgatattattttatatttgtaagaatggttataattaaaaaattaaaaaataatagatgttggtatggatgtggtgaatagggaatattttttttttttttttttttttttttttttttgagacggagtttggttttgtagtttaggttggagtgtagtggcgtaatttcggtttattgtaagtttcgttttttaggtttatattatttttttgttttagtttttcgagtagttgggattataggcgttattgtgttagttaggatggtttcgattttttgatttcgtgatttatttttttcggttttttaaagtgttgggattataggttggagttatcgtgtttggtttgaatagaaaatatttttatattgttgataggaatgtaaattagtataattattatggaaaataaggtggagatttttttagagaattaaaagttgaattattatttgatttagtaattttataattttataatgggtatttgtttagaggaaaataagttattatatgaaaaagatatttgtatatacgtttatagtagtataatttataattgtaaaaatgtggaattaatttaaatgtttattaattaatgagtggataaagaaattatttagttataaaaaggaatgaattaatggtatttatagtaatttggatgcgattgaagattattattttaagtgaagtaatttaggaatggaaaattaaatatcgtatgtttttatttttaagtgggagtaaaattatgaggatataaaggtataagaatgatataatggattttggggattcggggaaagggagggaagaaggtgagggataaaaagttataatttgggtgtagtgtgtattgcgtgggtgatgggtgtatatttgttttttttaaaatgatattattattattttgttgttgtttgagttttttgtaaattttagttattaattttttattagatgaatattttgtaaatatttttattttttaagttgttgttttatttttgttgattgtttttattgttgtataggaaatttttagtttgatgtagttttatttatatatttttgttttttttgtttgtgtttttaaggttttaattataaaattttttttgcgtttaatattttaaagtgttttttgtatgtttttttttagtaggtttatagttttgggttttgtatttaagtttttaatttatttttagttgatttttgtgaatggtgagagatagtagtttagttttatattttttaatatggatatttagtttttttagtattatttattgaagaaattgttttttttttagtatatgtttttggtgattttgttaaaaataaattgagtggttgggtacggtggtttacgtttgtaattttagtattttgggaggttgaggtagacggattacgaggttaggagtttgagattagtttgattaatatggtgaaatttcgtttttattaaaatataaaaattagttaggcgtgatggtatacgattgttattttaggttgaggtaggagaatcgtttgaatttagtaggtggaggttgtagtgagtcgagatcgtattattgtattttagtttgggtgatagagcgagatttcgttttaaataaaaaaaaaagaaaaaagaaattaattgtaaatatatggatttatttcggggttttttattttgttttattggtttatgtgttcgtttttatgttaatattttgtttgttattttggttattatagttgtatattttgaagttaggtattgtgatatttttagttttgttttttttgtttaagattgttttagttatttagggttttttgtggttttatataaattttaagatttttttttttatttttataaagaatgatattggtattttgataggtattgtattgaatttgtagattggtttgggtagtatggttattttaataatattaatttttttaatttatgataatggaatattttttaattttttgtgtttttttttatttgttttattagtattttatagtttttattatatatttggttaaatttatttttatgtttttttatagttattgtgaatgagattttttttttgattttttattattttgagtttgtttttatggtttttattgtgtttaggtatattttatttatatttaattggttggaagtttttattatgaagtgatattgaattttattaaatgttttttttgtagttatagagatgataatattagttttgttttttattttattaatatgttttattatgtttattgatttgtatggaaagtttatagtttttttatgttgattttatattttgtaaatttattaaatttgtttattagttttgagagttttttgatggagtttttaggtttgtgtataaataagattatgttatttgtaaatagtaataatttgatttttttttttttaatttggatgttttttattttttttttttgtttaattgttttgggtcggattagtattatgtgtttttgttgttgttattgttgtaattttttaaaattttttatttatttttataggaattagtttagtattatgttaaatttggtaaaagtaggtatttttattttgttttaatttttagagggaaattttttaattttttttttattatgtatgttgttaattatcgaattgttatatgtagtttttattgtatttaggtatattttatttatatttagttggttgagagtttttaattatgaagtgatgttgaattttattaaatgttttttttgtatttagagatgattattttatttttgttttttattttgttgatatgatttattacgtttattgatttgtagatatgtaattatttttgtatttttggaataaattttatttgattatggtatataatttttttgatgtgttgtggatttagtttgttattattttgttaatttttgtatttgtgtttattagcgtgtagttttttgttgttgtatttttttttggttttgataataaggtaatgtttgttttttagaataaatttgaaagaattttttttttttttaattttttggaatagttttagatgaattggtgttagtttttttttaaatgtttggtggaattgaataatgaaggtatttagtattgggtttttttttgttgggagattttttatttttgatttaagtttattatttattattggtatgtttaggtttttaatttttttttggtttatttttggtatattttatgtgtttaggttaaattttagttgtttttataatttaatgagagttatggattaaaattttgggtaaagtatttttcgtggtagttagattttttaaaaaaatttttttcgggtcgggcgcggtggtttacgtttgtaattttagtattttgggaggtcgaggcgggtggattatgaggttaggagatcgagattattttggttaataaggtgaaatttcgtttttattaaaaatataaaaaattagtcgggcgcggtggcgggcgtttgtagttttagttattcgggaggttgaggtaggagaatggcgtgaattcgggaagcggagtttgtagtgagtcgagattgcgttattgtagttcgtagtacggtttgggcgatagagcgagatttcgttttaaaaaaaaaaaaaaaaaaaaaaaaaaaaaaaaaaaaaaaaattttttttattgtttttattttttttgttgttgttgttttaagtgagttatgggtttttttttaattgaattgtataagtaaaatatttttaagtagttttgaattagtaataaattaattttttgtttattagttttgtttgtttaattagtaaatgtggggagggaagaattttagttgtttttttttttttatttttttttttttggtttttgtatggtataaaaaataaaatttttttgttgaatagggatattttttattattgttttgagattaagattttgatttatttggtttgagagtttaatttttataaatatttattttttttttttttatgttattaattttttaattaagtgttttattattgtatatagttgttagggaaatttaaatttatatttataaaaggtgttagttaggtgcggtggtttacgtttgtaattttagtattttgggaggtcgaggtaggtagattataaggttaggagattgagattattttggttaatacggtgaaatttcgtttttattaaaaatataaaaaattagtcgggtgtggtggcgggtatttgtagttttagttatttaggaagttgaggtaggagaatggcgtgaattcgggaggcggcgtttgtagtgagtttagattaggttattgtattttagtttgggggatagagtgagattttattttaaaaaaaaaaaaaaaaggtgtttaggtggttgattattatggagttattgtaatttgtaaagttattaattttaaagtttttaaggttgttttttttttttgattgaaatgttataagtagtgagttttattttaatatttgtagaaatgttattatgtttaaagtaggtagaaaaaaaaagagagagagagagagaatttttatatgttaattttataattgttggtttttaaaaataatgattattttagttttgaatttttttttattttgtttatttatttataaatgtgtataagaaagttaatattgattttgaatattttaaattaattaatatattattgtatttgtgtgataataaattttatatagaagtttttatagtattatttttagatgaaagtaagtttggatttatcgtaatagatggtagtggtgtattttttggtattttttaaggaaatataagagaagttttgtaaaaatttattgtggattttttaaagaaatacggtaaaggttagttagttttgcgttttgtttgtttaagaatggaaaagtgatttaataatgtttagaaagtagtagagattgttgtgtagttgtttatttttggggataaagggaaggtggttggtttagttttagttggattcgttgattttaaaattgaattaagttaatttgatacgtttgattagcggttataatcgaaagttttaaaattagttgataggtcgggcgtggtggtttatgtttgtaattttagtattttgggaggttaaggcgggcggattacgaggttaggagatcgagattattttggttaatacggtgaaattttgtgtttattaaaaatataaaaataaaattagttgggcgtggtggcgggtgtttgtggttttagttatttgggaggttgaggtaggagaatggcgtgaatttgggaggcggatttgtagcgagtttagattatattattgtattttcgtttgggtaatacggtaagatttagttttaaaaaaaagaaattagttgatatattttatggtggtgaaaatggatttaattaagttgttgggttatttattgaagttttttttaaagtgaaatttatttaaaagaagaaattagtagggatatattgatgaaattagttaggatataggtaggtattgttttggtgttgaagatatattaaaggttttggaaatgggagttgtagaaattttaatagtttatgaaaatttgaatataatgagatatgttttttattgttaaggtataaaagaggagaaaattttttaattttagagtaagaaaaggataaattttattttatagataaagagattaggtaggaatatgcgtttattaagagtatgtttttgttgaaatggtttgttaataattataaaaaagtcggagttatattggaaattgttatatataaattataagaagggttttagtttgtgaaaggatttggtagaattggaggttttttgtggtattaagtggatttttaaagaatggaatattaaggaggagacgatgaatttttttattttgatgattattaggtagtcgatatgggttcggtaaaatatgttttattttttagtatttaatttaaggagtatatttatgatggaatttaaatagatttttgttttataattggaatatttttagaatttaatttatgagtattggatattgaaaagaaaatagaaataaaattagatttaattttatattttggtttgttacggtgttagcgtagtagtttataattaagtttttaaatgttattttggattaatttaaaaaagaattttagtttttatttttattcgatggtgaaattggttgtttttgtattttatttaaaaaatgatttttttaatttttatataaataagtaaaaatattttaattgttgtaaatttttaaaagttaatagaagtgagatcgtattgtttttttattttgattggagagaaattaaattgttatattttgtagtgatttatttatatggtatttttagtttagattgtataagaagaaatatatgtggtgaaatgttggaattattttttttttggtttttgtttaatgatgaaagagtgagttaataggaggtaattttaattttatttttttacgttattttttttttttttagattggtcgttttaaggatgaaaattgtattgtaaaattaaattgatttatgaagtatttgggttagtgtattgtttatttttatttgtttgtagatatatttgtgttcggtgtttgggagttttttgtattaatgtttcgataagggttttaataattttaatttattcgaaattagtttgggatggatatgatggggtttttgtgttattgttgggattgggagaaataaaatatgtaatttaagtggaagtaaaataattaaaaataaaataaataaatttattgtttgattttatgtttttttttaattatcgttttatttttttgatattttttatagaataattttttagttaattgttttatgatgtttttaatatattaaatggatttatggatagtgttttaaaagttaaatatttttataaggtttgttatgaatatagatgtttttaattttttatgtatattattttttgaattttagaggtaatttattttattttgtttaattttttgatcgttatatttgtgtttttaaatagtgtgttatagtgtcgttttgttttttatttttatgtattatttttagtgtatagtttttttttatatatttttttttttttaatatagttattttataattttggttagttgggtgtttattatttatattattatgattatagaaatgttatttatagttagattaggaaatgttatttataattagattaggaaatgttgtttataattagattaggaaatgttatttataaggattatttttttttttggaattgattttttaatttttttggaattaataaatgttttatttttttatgtgtttaatttttgttgtatttattataaaattttttttaaatttttttttaaggtttttgttatagtttgaatgtgttttttaaagtttatgtgttggaaatttgatttttaatgtagtgatattggaaagtaaggtttaatagaagttgtttgagttatgagcgtagagtttttatgaataaattaatattattattatgggagtgagtttataataataatattgtttttttttttgtttttgatttatttgttatgtgaagatatagtaagaaggtttttgttaaatgttggtggtttgattttggatttttagttttataattgagaaaataaatttttgttttttataattgatttagattatggtattttgttatagtagtataaatgaattaagatagtttttatgaatatatttaattatgtttcgtgttttattaattttatttttgtgaagatattttttttggttttgttatacgtggattggtgtatgtatatttgggttgatttttaagatcgtttttattttattttgggtatttttttgttttttttttatgttggtttttttattgtttggattttatgtgtttttttttttggttttttttatcgtttttgttttttattttattcgtgtttttaagggaatatggaaagtaaaatttgaaagtttaagtttttgaaaatgttttcgggttattttagtatttattttaatttggatttggtatggaattttgtattgaaaatattttttttaggaatttttatgatattttattaatattttttagtttttaatgttgttttttttgttttttgatgtttttgggatttttttttttttatttattttttaaaattttattgtgatgtgttttggtgtgggtttgtttttatttattatagtaagaatttggttggggttattataagttaaatttttgtttgtaaatttggagaaatttttttattttaaataatttttatttttttatttttttagaatttgtattattaagttgtaggaaatttttgattgatagtttagtattcgtatagtttttttgttttttttgatattgtttttttatttttaatatttagtggtagtataaatttatttttttaagtgatttattgaaatatttatttaaatgattattttttgatttttaagagtgttttttggttttttgattgtatataattttataaaattttatttattatttataaatgttatattttattattttttttaggtattattgagaatagtggtagtggatttgttagattttttggttatttgtttttatggtattatgaatttttttttattatatttagtttagtagtaattttatatttttttttgtaagttttgttaaatgtgtattttttttatgatagtgtaaatattaaattgttagtattttatttttgttttttattgtatttttagggtttagtagattatatgatttattagaggatttgaaatatatgttgaatgaggaaatataagtgtggttaggtagggaaattagatttttttgattaattgttttttgatgtttttttgagtattgtattttatgattttttgttatagaatatttagggatattgaaagagtttattggtatgggatatagcgttatatttattattagatggatagggaattagtgaaagatgattttattaagagaaaattttttgggtttattttatttttattatttgtttaatttttttgagtttttttttttttgtttatataaagatattatatatcgggttttttatgggtttgtattgaagattaaatttgatttttttagtaaaatatatggtattatattttgaggtatattaagtgttttgttatttatagttattatttttatattgattatagtatttggattgttttaattattttgtttttataaattaaaatttaagaaatatttttgaatatatattttttagaatgtgtgtagttatttttttaggaaaaatttttgaaagagaaatatatgtattgaaatgtaagtttatttatattgttaatatgtttcgtaaaagttttttttagaaatttatattttagagttttttgttgttgttttgttttgttttgtttttgagatagagttttgttttgttttttaggttggagtgcggtggtacgatttcggtttattgtaagtttcgttttttgggtttatattatttttttgttttagttttttaagtagttgggattataggcgtttgttattacgtttagttaatttttttttaatatttttagtagagacgggttttatcgtgttagttaggatggttttgattttttgatttcgtgatttatttgtttcggttttttaaagtatattcgttttttattagtttttatgatagtgtattttttttatttttggataatatgtttattatttatttttatatatgttaaattgatagattttaatttttattcgtatttttaatgttatgtttttatttttttttatatttattaattagagtatattgtttgatatttgatttatttttttttatattgttttttaatattattatttttttattgggatgatttaaaaatgttgaatttgattaagaaaaaaagtagtttttgatttttgatattgatagtaggttttagtattgttagaagttgttttattgtttaatattaggttatattattttttttttggatataaattatattatataatattagataaggatattttgggaatatgataaaataagataaaataggggtattatataatttagtataagtatagataaaaattaaggtattgtgtattttataaaatattaaatttttttttttgttggttaatatgagtgacggttgtttttttattagttataattttatttttgttttgttttgtatttattatgggtaagatttattgagatagtcgtagaaatgtttttgttttttgataatattttatttatagttaatttttattttattagttttttttaaaaatatttattaaaagattaaattttatattgtattttttttaatatttttacgttaagatggtgtgtatttttttttgtgataatgagtaataaattttagttgtttagttatagatgtttttggtggtttttggttgaaagatattgaaatatgttattttttgtttttttaattatttatgtgtttttgaatttgattataggtatatgtttgtatatttgtgagtttgtggttgatatagagaagttttatttttttatttatggttttttatatttgggttatgtttatagaatttttttttattttataattgtaaaatttaatatttatttttatttaggtatagatgatatgaagagagggaagttttagagtgaagagaaatatatagatatgtttgatttggggagaaagttggggggaatgagtaagaagtaaagagttttaaggtggagttttaatatttaaaatttggttaggtgtggtggtttacgtttgtaattttagtatttttggagggtaaggtaggtagattattcgaggttaggagtttaagattagtttggttaatatggtgtatttattaaaaaatataaaaattagttaggtgtggtggtgtgtgtttgtaggtttagttatttgggaggttgaggtggaagaattatttgaatttgggaggcggaggttgtagtgagttatgattgtttaattgtaatttagtttgggtggtagaataagattttattttaaaaatgaaaaagtttaaattatttgtttataattttaaaatatgtttataaagtttataagatattttatatggtaattttaataaatatttttttttgggttaagtaatgatttatatatttttttgtgtttattaggttatagaaaatagtaatattaagagttttaatgaaatattgataaggattagttttggtgataagtatttttgaaaatgtatgattttgagttgataaattatgttttggtaatttatacgtatattttaattgttaaaatatatattgaatttttttgggtttgttgtattttagggatatgtttaagatttatatagttaaatttatgggttttatgtgaaggtaattttaatgtattttaatttgggagttataaggtatttttttttgtgggggagattgaaaattaagagtattttagataagtattattaaaaatggtaattattagttatatatggttatttatattttaattaattgaataaaatttttaaaaaattaattttttattatattagttatattttaagtgtttaataattatatgtaattagtggtttttatattggatagtgtagatatagattaattttattattatagaatgttttattgaatagtattattgttatagagatttttatgttttttttaaaataaaatttaatttttagtgagatgatatttggaagtgggtttgttttagaggaagtgattatgttatgaggttagaatttttatgaattgaatttgtatttttataaaagagattttagaaagttgttttggtttttttgttatgggaggatgtagtgagaggatagttatgaagaagtaggtttttattagatatagagttagttgatattttgatattggattttttagtttttagtattgtgagaaatattttttttttgtttataagttatttaatttagggtatttttgttatagtaatttgatggattaagataattgtttttggtgttatgtgggttttaagttaagtgtattagatatatttaaaatgaaagggtgattggttgtggtgatttacgtttgtaattttagtattttgggaggttaaagtaggaggatcgtttgagtttagaagtttgaaattagtttggggaatatagtaagattttatttttataaaatattttttaaaattagttttataaaatatataatttttaaaattagttggatatgttggtaagtgtttgtagttttaatagtttaagagtttgaggtgggaggatggtttgagtttttcgagagttcgttattatagtgagttattattatgttattgtattttagtttgggtgatattgtgagattttattttggaaaaaatagaaatgaaagggttaatattattttttatagagattgtaaatttaaagtgggttaggagtgaaatttttattttgtgtttttaggcgtaaattatttttagttttaaaatggaaatatatttgttatttttgtttttagattaaggatattttttgtatttaatttataggtgataggtttttttttataagagtttagggtaaggtaaatttagcgttagttaagttttgggatgtagggagttttgttcggggagaaaaatttgggaaaatgaagaggtaaaggggttagttaagaattttttatagtttatttagaataggattttttaaagtgtaatttgtggaatttttgtgggttgttgaaatttttttatagatttataaggttaaaagtatttttataatataatgaagatattatttgtattaaagtaaaatttgataagaagggaggttatggtattaaattgaaatagtagttattatatttttaattattttttaattatagaagaaaaaataggttttatttaaatatgtcgtggttgaagtattaaagaattattaattttattaaatttttattttagaatttatagtttaatatattttaaatgagtaagtgggaagtacgtataaggtatttttattatattttaaattaggatgtttgaggttaggcgtagtggtttttatttgtaattaattttagtattgtgggaggtttaggtaggtggattatttgaggttaggagtttaagattagtttggttaatatggtgaaattttgtttttattaaaaatataaaattagttaggtatggtggtgcgtatttgtagttttagttattagggaaattgagttataataattatttgaattcgggaggtggaggttttagtgagttaaaattatgttattgtattttagtttgggtaatagagcgagattttgttttaaaacgaaaataaaaataaattaaaatgtttgtgtttataaaattattttgtgagttgtattagtttattttttatggaatattttttttatttgaaagaatgaatgatagaaatgattattatttagatttgaatatttggttgatatttttttaaaaacgaatataattttgttttttttatataattaattgatggtattatttttaatgataaaaggtaagtttttaagagaaaattagaattttggggaatttgtatttattattataagtttgatggttttttaatatttaataattttttttggtaatatttgtggtaatattaaaaaatgtgattttttgataatttgtagttaaatgtgttaatattggaagatataatgtggtgaaattgtgtttttttttttaaaagttatgtattatataagaagtatttaatgtggaagtcggatttatatattttaatgtaatagtatgtgaaatagttattgatagttttatgttttatattataaataatttttaagaagttaatatttttattattttagtgtagtattaaggatgaatatttagttttttaaaaatgttattaaaaatatttttggtttagcgaggtgatttatatttgtaattttagtattttgggaggttaaggtaggagaattatttgagtttaggagttttatttaggagttcgaatgagatttttatttttataaaaaataaataaaattagttgcggtggtgtttcgtgtttgtggttatagttgtttatgaggttgaattgggaggattatttgagtttaggaattcgaggttgtcgtgtgttatgattatattattatatttaagtttgggtgatagtatgagattaaaagaaataaataaataaataaaattttttaataaaatttaaaataagaatagtaataaaaatattattgtgtgaggatggatttttttttatatattttaattaaatataatagattaattaaaataatagattaaatgaaggagaagaaaatttattaattttttaatgagatatataagaaaaggatttataaatatataaaatgtaaaaagatgtattttttttattatattgtttattttgggaaatattgattttgtataaaaatatttttaatatgtaatgtattattaatattttaaatgaataaaataatttaagtgattttagtttttaatatggtaaatattaacgtatataatttatataaaattatttttagagtttttattaatttttaagagtatgtagagattttgaaattaaaacgtttgagaaacgatgacgtaatttttagttttggattaagggagaatgtgtgataaagagtatttggtataggaggagaagggttaggttttattttgtttttaggattgtggtaagggttttgtgtgattaggttagtttaggtttaggtttaggtttggtttttagtttttattttgtttattgttttgttttgatagaagattatgtttgtttttttttttgtatttgagttttggtttttaagtttttaattttttttaggatagtcgtaggagttattttttttgttattgtttttataagttttggggtggtttttgtatataggagtttttgtggtattaagagattaatttttagatttatttagtttttgtttttttagggttgttttttggattatttttcgtattttttttttaattttttttaggaaattaaattttggaattagagattatatttcggttttttattttagataaatttttgttaggtttttaataggaatttatttttggtttatttattttttttttttgtttttggttgtaataattttagtgttggtttaaatttaaatttatggatgtttagattttaatttaatttatagttggttggaaaatagggtttataagtttaggattatttttttttttttgaaaagggaattataattgtttgttgtggtatatgaggattggtgtgggagggaggcgagaatagtatttgtgagaaaagtataggtagtattgatgttaatatgagtggttgttttattgtagttgttataaaatagtatgtggtttgtagttatattaataaagatattgtttttagaatagggaggtgttgtatattggttatttatttagttaatatttgttgagtgttggttgtatgaaatgttagttttatatttggaaattaaaaataggtaaaaattgttggttttgaggggtatatgttttagtgggaaaatatagattatgtattataagtagagtaaataaggaaagtgtttttgttaaaaggtgttgaggggtgtgaggtaggtgatttagattgtgggtgtgtggggatagggaagatggttgttttattagggtggtttatggttttattgggaatgtgattttaagagaaaagatgaattatttatgaggacgtttggggtaggttttttttaggtaggggaatttttagtgtaaaggtattagaataggagtatatttgggttgtgggaggagttgagggggtttagatagttgtagtagttattgatataaggttagagatttggggagattatgtaggtttgaggatattggaagggttttgattttgttttgagtgagatgggggagatataaatagttgttagtagagtagagatttggtatattttttaaaaggattattttggttgttatgttgagaatagaattgagagatgaggggtgagtgagaaagtgggaaaattgtaggaaattagtgtagtattttagattagtaattttggttgttttgtttggggtgtgagtagagaaaagagtgggaagtgattggattttagatatatttttaatatggattttatagtattttttaatagattaagtttggggtatgaaaaagaggagttaaagaggaattttaaaattttagattgtgtaagtagaaaaatgaagttgttgttagtatagatggggaaaattttgaaaggggtatatttgaggagggggtattataggtatttaatttaggaaatgttgaattttagatgttagatatttaagtgaggttgttgtgttggtagatggatatgtaagttggaaatgtaggagaaatgtttgggttgggaaaatagatttaggagttaatgttatattaatgatatttaaagtatagagtatgtatgagtcgttaagggaaagatggttatagaagagaaaaaggatatggattgaattttggatttttagtgttaagggattttattagaatatattttgatagtagattgtatagttttaatattatatttagaaagtaagtaaatttgagaattttaaattttagtgtgcgtaggaattatttggataattttttaagatttaggtggtttggagttgagaatgagattttgtgtttataaaaaagttgaggtagatattgatggtttttagattacgtttttagtagtaagaatgtagattaggatttttaggtggttgtgtattagttttatttgtggtttgttatttttgggatttatgttttatttttgagatggtgggtatggggaaaggtttgagtatttttgtaaaaaatttataaggaattttggtgattagttagattgggaattattgaggttagtgattaatagtgtttagggtgggaaagggttttaagtttatatttaaatgttattttttttaatttaaatataaaggatttttatttgtttatttatttattatttatttttattaggttggtgtttattttattttgggaaggtttgtgagaataggtttaaagttatatagttagaagtagtatttataattttattttaggtggagttttatataggaattattgtttttgatgttgggtatagatgttattgtttatattaatgatattttaaagttagatattggattttgtagatagaattgttattacgattgtttttggtaattggatattgttgttgtaatttatattatatttattaaaatgtgtgtatagtattagtttatgttattaggttgagttagaatttagtaagtggttatttgtttggtggaatttaagttttattttatatttagttgttagaatatttggaaaagtgagtttttttttcgtggaagaagttggtgtttgttttttataatgattttttaagtatgaaattttttaagtatgaaattatattttttaagtatgaaattttttttaatatggagagggtttaggtgttgggatataggaagatagagtggaaaaagaatgaaaaaaaaagttaatttttagagtagtaatttgagattagaattttatttggtatattatagatatttgggttttgttgaatgaattagtgattaattaattataatttttaatttatttttttgatagtttgttatgaagtataatttttttttgattagtttatatttagataagtagagtggtattgtgggatggtgaaatgattgtttaaaatttattttttgttaggattttttaaaatttagatgtttaagattttagaggatttgtgtatatattaagattttatattaatatttatatttttttgtatatgtatatattttttggaaagaatatttgtgatatttatgtttttgtaattttattttaggaaatttttttttaaattatattttttttttgtttttatattataataattattaatatagaagatttttgtgattaaagatgtgggggtttttttttatatattaagtagtggatattagttgggtattttttagtttaatgttaatattgtttatttggagatagtattatattttatagattgggggtttagtttttaagattattttatattagatattaatcgtagaagtttttattatttattttgggttttattaatttgttggagtagtttatagaatttagggaaatatttatgtttattagtttattataaaggatattataaaggatatagatgaaaatacgtgtagggtgaggtattagggaaggagtatggagtttttatgttttttttgggtatattaatttttaaaaatttttatttgtttagttatttggaagttttttgaatttagtttttttgggtttttatggaagtttcgtgatattagtatttttttttttaatgtatagtgtgggattttttttagagagggttttaagatttataattagaaaggtagaagattagagttttgttttggggtaggtgaaatgaggttagaagagagattttgatttttgaggtttgtcgaggtcgaatatatttaatattattataaaagatcgaaataagggaatataggagttaggaattaggaattgtggttaaaaattaatttataatattatatatttttattgttttagtttatttaggttgttataatagaatattttagattgggtggtttataaataatataaaagtattttttatagttatggaggttggtaagtttaagagtaaggtgttggttaattttatgtttgatgaaggttttttttttgttttataaacgtatattttttttaagtggttttatatggtagaaaggtgaagagaattgtttggggtttttttgataaaggtagtgattttatttatgggggttttgtatttataatttaattatttttaaaaggttttatttttaagtattattatattggggattaagttttaaatataggaatttgggtgggggattggagatataaatattagtttagagtatttataaaagtttaaaaaattattttaggtttgttattatgttatttaaattttgatttatgaatagttgatattaaattatttttttataaatttttttaaaaaggagaaaggaatattgtttaatatattttataaggtatgttttataaggttggtattaaaagtagataaaataattataaaaaaattatagatcgttatttatgaatatagatgtgaaaatttttaagaaaatattagtaaataatttagtaatgtataaaaataattatatattatgataaagtgagatttattttaggaatgtaagatgggtttaatatttaaaaattaattaatgtaatatattatattaatagaataaaaatttataattattttaatagatgtagaaaaaggttttgattaaattcgatatttttttataatagaaatagttaataggtgggtatattggtatgtgtttatagttttagttatttaaggagattgaggaaagagaattatttgaggttagaagttcgagggtattttgggcgatgtgttgagattatgttattttaaaaaaaaaagagttaataaattgggaattgaaaggaatttttttagtcggataaagggtatttataaaaaagttatagttaatattatattcgtattagtttatttatgtattgttttaaagaaatatatgaaattggataatttataaagaaaagaggtttaattggttaaaggttttgtaggttatataggtttttgtttttggggaggttttaggaaatataataatggtggaaggtgaatgggaagttagtatattttatatggttgaagtaggaagaagagagaagggggaggtggtatatatgtttaaaaagttaaattttattataaaattttaacgaaaatttattattatgagaatagtaagggggaagtttatttttatgatttaattattttttattatattttttttttaatattggggattatagtttgatataagatttgggcgggtatataaatttaaattatattaatatttaatggtgaaagattggtcgttttttttttaagattagtaattaaaataagaatatttatttttattatgtttatttaatattattaaaggttttagttaagataattagataagaaaaaagtaataaagtatatttagattggaaagaaagaagtaaaattatatttatagatgatatgattttttatataaaaaaatgttaaatgatttattaaagagttattagaattattaattttagtaaggataaaggatataatattagtatataaaaattaattgtatttttaaatttttgtaatgataaatttagaaatgaaattaagaaaataattttatttgtaatagttttaaaggaataaaatatttagaagtaaatttaataaaagaagtgtaatttaaatattaatgaaagaaattaaaaatttaaataaatggggtaaagtttatggattagatttaatataatttaatgattatatttttaaattgatagatttagtataatttttattagatttttaaatgattttttcgtagaaatttgtaaattaattgtaaatttataaagaaattaaagggacgtagattacgtaaataattttgaaaaaaagaataaagggttaggtatagtggtttatgtttgtaattaatcgtagtattttgggaggtcgaggtaggaggattgtttgaggttagaagtttaagattagtttgggtaatatagtaagattttgtttttataaaaaataaaaattagcggggtatggtggtatatatttgttattttagttatttgggaggttgaggtagggggattgttttagtttagaaggttgaggttgtagtgagttatgattatgttattgtattatagtgtgggttatagggtaagaaattgtttttaaaaaataaaaagaagaaaagaataaagtagaatttattttttttagttttaaaatatcgtataaagtaatggtaattaagatagtgtggtatttgtataagatagatatagattaatagaatagaattgaaatttagaaataaaattatgtgtttattgttaattgatttttagtaagggtgttgagtatatttaacgggggaaagtatagtttttttaataaatggtattggggaaatttgatagttatatataaaatgatggagtggattttatggtggttgaagtgtgtatttcgaaaggtttgtttaagatttgattattagtatttgtgaacgtgaatttatttagaaatggtgtttttgtatatgaaattaagtttaggtttttaagaaaagattattttggatttagggtgggatttaaatttagtgattggtgttttaataaaagagaaggagatatgatataaatagagaagagatataggtaagaatgttatgtgaagatgaaggtaaagattttagtgatgtatttttaagttaatggagtaataattattaatagttattagaagttaggaaagaattatggaatgaatttttttttagagtttttagaagaaattaattttgttaatatttggattttaaatttttggtttttagaattgtgatagaatatatgtttgttgttttaagttattaaattttggtaatgtgttatataaggtttaagaaattaatataggtttttattttatattatatataaaaataagtttaaaatggaagaaagatttaaatgttagtggtgaaattataaaatttttggaggaaaatttaggtgataaatttttatgaattggtcgggtgcggtggtttatgtttgtaattttagtattttgggaggtcgaggtaggtggattataaggttaggagtttgagattagtttgattaatatggtgaaatttcgtttttattaaaaatataaaaattagtcgggtgtggtggtgtatatttataattttagttatttagaaggttgaggtaggagaatggtttgaatttaggaggtagaggttgtagtgagtcgagattatattattttattttagtttgggtaatagagtgagatttcgttttaaatatatatatatatatatatatatatatatatttatgaatttaggttggataatggatttttagatattatgttaaagtataaataaaagatattagataatattgagaaaaattagatgttattaaaattaaaatgtttatgttttaaaggatattattaagaaagtgatttataatatatatatatattaaaatattatattgtattttatatgtgtattatttattaattaatagtaaatatttagattaaaaaattaaaatagttttaaaaattaagaatttttttaaaagtgaaaaaaatttataggaaaggagaaaagatttgtaaattatatatttaataagagatgtttttagaatatataataattttttataatttaattgtaaaatatatataattttaattttaaaatgagtaaaggagttcgagcgtagtggtttacgtttgtaattttagtattttgggaggttgaagtgggtggattatttgaggttaggagttcgagattagttttattaatatggtaaaattttgtttttattaaaaatataaaaattagttgggtgtggtggtatatatttgtagttttagttatttgggaggttgggatataagaatcgtttgaatttaagagacggaggttgtagtaagttaagatcgtattattttattttagtttggatgatagagtaagatttcgtttttaaataaataaataaaaatagaatgagtaaaagatatgaatagttatttttttaaagaagatatataaatagttaataagtttataaaaaagatgatcgatattattagggaaatgtaatttaaaattatagtgaaggttgggtatggtggtttatatttgtaattttagtattttgggaggttaaggtgggtggatcgtaaggttaggagttttagattagtttggttaatatggtgaaattttatttttattaaaaatagaaaaaattagttgggtatggtggtaggtatttgtaattttagttatttgggaggttgaggtaggagaattgtttgaatttgggaggtagaggttgtagtgagtcgagattatattattgtattttagtttgggtaatagagcgagattttgtttaaaatatatatacgtacgcgcgcgtatatatatatatatatatatacgagatattattttttagttaaagaatggttagaattaaaatattagataataagtattgttaaggatatgtaggaatgagaatttttagatattgttggtaggaatgtgtaattatgtagttattttggaaggagttaggttgtggtttaattgattaaaaatgaagatattatacgatttatttatttttaggtatatgtttaagagaaataaaaatgtgttatataaaaatttgtaaatgaatatttatagatgtattatttgtattagttaaaagatagaaataatttagatgtttataaatcgataaataaataaatgtgatatatttatggaatatagtattatttggttataaaaagtaatgaaatattgatatatgttataatataaatgatatttggaaatattaagtgaaagaaattagttataaaagattatatatgattatatttatatatgaattttttaaaataggtaaatttatataggtaggatatagattaatttttgtttagggtttggggtgatggggaagggggaataagagagtaatagttatagggtatggggttttttttttaggcgatgataatattttaaaattgaatgtagtgatggttgtatatatttgggaatatattttaaaattttgattgtatatatattttatttttttttagatttattgaagtataattgataaataaaaattgtatagtgtgattttttatttgtatataatatttgtatatatttatggggtatatgtgatattttgatatatatatagtatttaataatgaagttagggtatataggatattcgttattttaagtatttatttttttgtgttgggaatattataagttttttagttattttgaaatatataatatattgttgttaattatagttattttattgtgttattaaatattagaatttattttttttatttgattgtacgttcgtatttattaatttatttttttttattattttttttatatatttataaatatatatatatatatatatatatatattttttttagtttttggatattatttttttgttgtttatttcgattagattaattttttaaagttcgtatatgagtgagaatatgtaatatttgtttttttgtgtttggtttattttatttaatattagaatttttagttttgtttatgttagtggaaatgataagattttattttttttatagttaaatagtattttattgtgtatatatgtcgtatttttttaatttatttatttattgatggatagttaggttgattttttgtttttgttattgtaaatagtattatagtaaatatgggggtgttagtatttttttgatgtatcgatttttttatttttggataaatatttagtggtggtattgttggattatatagatttatttttagttttttaagaaatttttatattgttttttatagtggttgtattaatttatttttttattaatcgtgtgtaagagtttgtttttatattttagttattatttttgtttttttaataatagttattttagttagggtaagatgatatattattgtggtttgttttaaatttttttgataattagtgatgttgagtattttttttatatatatgttggttatttgtattttttaagaaatttttatttagattttttgattatttttaaggggattttttttttttttttttttttttttttttttattgttgaattgtgttttttgtatattttggatattagttttttgttggataatttgaaaatattgtttttatttatagttggtttttttattttgttgttttttttgttgtgtagatttttagtttaatatagttttatttgtttattttttgttgttgttgtttatgtttttgatgttttaattataaaatttttgtttagattaatgtttttgagtattttttttatatttttttttagtagttttatagtttcggatttattatttaagtttttaatttatttttggttgattttttaatatggtaagagatatgagtttagttgtaattttttgtatatggatatttagtttttttagtattatttattgaaaagggtgtttttttttggtgtttttgttgaaagttagttggttgtaagtatatgaaattatttttgggttttttattttttttattggtttatgtgtttgttttaggtcggtattatgatgatttggtttttattataatagttataaagttattattatagtttaattattggatggggtttttttgtggttttatatgaattttttttatttttgagatagggttttattttgttatttaggttgtaatatagtggcgtaatattagtttattgtagttttaattttttgaggtttaagcgatttttttgttttagttttttaagtagttgggattatatgtatatgttattatatttagttaatttttgtaatttttgtagatattttattaggaataaatagaaaatttgaatagattaataatgagtaataagattgaattagtaattaaaagtgttttaataaagaaaagtttaggattagatggtttttttgttaaattttattatatatataaagaaaaattaatattaatattttttaaaatatttaaaaaaaattgaagaggaaggaattatttttaatttattttatgaagtttgtattgttttgatattaaaagtagagaagaatataaaaaaaaagaaaattataggttaatttttttagtgaaaatatatataaaaattttgaataaaattttagtaaattgaatttaataatatattaaaaatatattataattaattgggatttattttagggatataagagtggtttaatatatataaattaatagatattaatattttttaattttatttgaaaaggtggataaaattgaatttggaattggaagatttgttttgggtttttattttgttatttttaaatttagtattttattagaattaagttatagggtgtttgagggtttagaagtttttgtttagtagataagaaggaattgttattatatagtttttgattttttagggattttagtaatttcgtattgaaaggagattttttgtttttttttttggggatttttttgtttagaaataaaattttcgtgttgtaggtgttttgaggagacgatatgtgggtgattttttttagaaggtagtggagtgaaagttttgggaaaagtgatagaaagagaaataaattttgtattggaagtttattgaaaattaattaagtaaataaatattttagtattttaattgaaatataagtataaatagaggttgattatgattgtatttggataagatgagtaaaaagttaaagtggtttgttattagttatttatgtattttgggtttgtttttagtagttaataaatgtttttttttttaataaatatttattaagaggttaatatgtgttagattttatagaataggtttataggtataatgttataaaggaatagaaatttaataggttttaagattaggtttgttaaataaatgtattataatttatatattatatatatatttagtatatagttattagaatataagattaaatatgttaatgtttatttaagtattatttttaaaagaaaaataaaataaaaattggaaataattaaatgatattaatagaatatataattaagttgtggtatatttatgttatggaaatgaattatagtgttatatattaatatggatgaatttaaaaataataatgagtaaaagtagttagttatatatagtataattttatttatataaaggttataaataagtaattgttagggatatatagatagtaaaatttataaaagttaggtgatagttatataaaatttaggatagtggttgtttttggttgtaggggagagagatatgaatgagagtatacgaggtttttgggatgtagtaatgttttattttttagtttgagtaacgggtatttggatatttattattgtttttttaaatatatatttttatttgtgtattgtatattttattttatattaaaaagaaaaaagattaaaaaaaaaaatattaagtgtgatttaagatttaagtagatatagtgtaaagaaatgaaaaggtggatataatttgaggtagatgatggatgtaggtttggataaattgagtttttgaaatatagatttttatttttagtcgtattaggtgtgaaattgttttgagagtattagttgtttttatgttagatttggaggggaaagagggtagttgaatttagtaatttatgtgtttagtattgaaaatttttatggtaaataattattaataggttatatgttaggttattttttagttttatttagtttaaagggtttgttattattttattgatttgtatttttaagttttttgtttgttgtattttgatgatttatttttatgtaaaatatagaatttaaagttgagatatagtaatagaggattagagaatagatatagtaacgaagtttttatgaggtaaattaggagggtaggaatgagattttgatgtgtattttggttaaattttagaattagtaaagagaggttagtttttaattttaattaaagtaaatttagttattttatttttatatagaagtggtttatattgatttttaaatttttttaagggattagggagtttttgaaatgtaaaggaaattaaattgatagtaatgtaaaatgaatagtgatttattatattagtaaatattgttaaaaatagaaagttaatggtgggattggaatttagaatatagaagttatgtttatttagtgttatattgtgtaatagggtagttatttgttatatgtggtaatttaaatttaaatgaaatttaattaaatattttattttatagttgtattagttatattttaaatgttttaatagttacgtgtagtaagggttattgtattgaggagtatagatatagaatatttgtattagtggttgatttagtagtatttagggtaaagggtgttttgttagtaaagtaaggtgggtattagaattattataatttaagtataatatttttgagggtatttatttttatttatttgtttttttgtttattaattttgaatttttgtttttttaattttttggtatttgggaagaaaataaattgattagaaaatataaattttattttgtttgataattgtaatttttattaaatttataaatttgttttttgatttattaatgagtgttaaaaatatgagtttgagaaaggttgagtttgattatttttgagtggatttaagtattaggaaggttttgtttaagtgggtgataggaagtgataaaaaaagttggaagaaatatgatagattataatatttttttttttaattttttttttttttattttgtttatttgggttaggttagaattcgttttttgtaaagtattttgtatttttttattgtaatttttatttattatattatttgtttatagagtgatttatgttattagttgaaaattatttaagggtagagatttttttttatttatttttagtaattaatataatgtttagtatgtaggaggtttttaaaattaagttttttatttaaataaattgtatagagtaagttatatttttaggggttggttagtagttatttgatgaaggtatgatattaaagattatatattaaattatagtaattttattaaaataattttggagggttgggaatagggagaataagagaagtagattagaataattttttatttattattattgtttaatttcggtttttttaagtggggaaattaatatttatgaaataattaatatatatttatattttataaaaaaaatagtttttttataaatgttattaaatattattgttattttaaagatgaggatattgaatattagaaaggatatgtaatttgaataaatgtaagttaattaaaaaagttaagttaatttttaagtgtagaattatttatttgtatttgatataaatgggaatatttattgaattttggagagaacgagtatttgaaaaaaaaaagggtttatttaagagatatgattttattataatagtattgaaattttaattttttattttttttatttgattttttaaaaagggtggtattgttaagaattttttttgatatggttttataattgtatttattttttttttattttgagatttatttataagaatatttattttaattcgatttttattgtatggttggaaaagaagatacgtaataatttttttaaatttttttattttttttatttttttatgttttttatatgtaagtagttggttttggtttttttttaagattttttttttgagtttttgttttgtaagttttttttttcgaattatgcgtttttggtgatttttagtttgtatttgtttttttttatttatttgtttttttttttgtgcgttttggatgttatgtttttttggtataatttttggtaattttgttttattggggggttgtagtatttgtttaaatggtttgtttttaaattttttagttttttttgtttgatgtatgtgtttttttatgtgttttattttttttttaggtattaaatagtattgttttagtttttttacgttttgggttgtttttttttttatttttttttagattttattgtttgtttttttttttattatttttattattattttattataataagattttgttttggtaagttagtagttaagagaaatagtttgttttttatagagtattttatattttttttgatatttttgtattattaattgttttgttgttgttgtatgtatattatttagattttgttaaaatgaagttagaaatttataatgtgattattttttttttttgaatatatttaaataggagttaagtttattttttttaatgatattaggaaaagttatatgttttttattttagtttagttgttattttatttttattatttttaggtgagtttgggagttttgaaagtattaagtatttattattataaattagtaattaggtttaaaaatgtatggtgttggaagtttttaaaaatgatattttgttttgtaattgtggatatagttgggtaatatttgttagtgtagatatattatttgaatgtgttatttgggtagaaggattttaaatttaagattttttttttgtgtagttttaaattgtatgatgtgaagataatttatttattaagatttttttttttagtggagattgttgatttgtagtaattttaggatttttagatgatgtattttaggttaatttggaagataaaaaaggtaaggtagatttaaatgtaggaggtgttagaataaatttgttaatagggaggattatagtagggttattttttttatgggaaattattgtatttttatggtagaaaataatgaatgtttttttaataagaggatttttttttttatatgaataagtatattttttttgtggatttagcgtgaattattgtgaatttcgtattggggattgtgagtgggaagagatatgttttttggtgaggtgttgtttaagtatatttatgttagtttgtttagtttttaagttttttttgtgttttgagacgattgtaggttttagttttttagacgattttaggtttttagttttttttttttgtagttttttgattcgggttttttttgattttattagtatatatagtatttttgttttttaattttttgttttgaaattttgttatttgattgtttagttttttgtttgtttgattaataatgttaattattttttattttaaatttattatgagattattttttgttgaattttttaggatggtaatttgtggttattttgggtttatttatagaggaggttgatggtaatataaatgaaaattattattttttatgtgttatttttggtttagtttgagtttattgtgatgtcgtatttaagttattgaggatgtttggtattttttttgtatgttttttatattatttagagtttaaaggatggtttttatagtttgatagagttagatttgaaatttaattttattattttttaggtgtgtgatttagggtaagtaatttttgttagtttttttatttataaaatggagatgtaagataaaaatttgttttttagggttataaagaataaatatgaattagatgtaaagagtttggtaagtttttaataaattttatttatttgttttttataggttaagtttttgattataaagtttttttagtttattttgttagtgattttttttttttttaaatatttgatatattttaattttataatttatttgaaaattaatcgtggtttatattgtgatatttgtatttatatattatttttaatattttgatgttgaaatttaggtttataaggaatgaaaattgtaatttatatttataaatatgatgtttttatattgttggaaaggatttgatattaaatatttggttttattgattttttaggaatatttttatttgtttacgtaagtttattttgagattgtaaacgtatgattattttatttttatttttttgtatatggtttttagtataatatttaatattagagtttgtgattttaagtttttaaaattaatgatttgttgattgttgatgatttttgatatataatatttgagtattttttttaaatatttgttataatattgtatttatttttattaagttattttttagttttttttgaagtttatagatatgtttgttttatatgtatgttttgggtttttatattttgtatttattagtatagttttattatattttaattatttatttatgttttttgaggttagagaatatagattttaattttgtaggtttagttttagtttaaaatttggtatagttgtttaataaatttttattgattagattgtgagtttttgttgggaaaaggatatgttttttaatgttttgtttttttattgtaatttataggggatgttggttgttttttaaattaaaaatagaaaattgaggagggtagaattttaagttttatttttaaaggagatatatagataagtgagaataaaaattgtttacgataattagtttaataatacgtttttttttgtaagatagaataataagtaattttatagttaagtgatagggtttgttattttttagtagtttgttgagttttaatttttttattatggcgttttttttattattatagagaaaggtagatgggagttttttttagcgaaaagattatagtttgtgttttttataggagaaaatagtgatggttttagaatttttatatgaatgaatttagtatagttattagagtggatggtggtgggagggttagtaggaaattagtaaataattataagttgtttttttagggaaagtttttatttggaatataagttatagattaatgaaaatagaaagattttttaaagatatttatttttatgttttataaaagattagggaaatgttagttgtttatttaacggatgatataatgaattaagagttcgataggcggtaggtataattaaaagttaaattcgatttaagttttatgaaattttatttaatgagtttttttgattattgttagttttatttatttggtaggagtcgaaggagaggaagttttaagtttttttgttttattatttttaaagttttgaatttttttttaagtgtattattttatttttgttttttttcgtttcgtgggattaagtatttttcgggtttttatttttattatttgttgttttttaaaaagtcgatttatttttttttaagcgtagtgaatcgttcgtaaagtacgaggtcggttgcgagttgtagaaagtttacgttcgttagcgggatttaaggaacgttagaattatacgttttagaatatttagttttgtttttaattacggtgtagtcgtaaaagggaaatatcggtttaggatttaggggagttgtagttttttaatttaaagaaattattatttggtaacgtacggtttttagggggatatatttcgcgattgcgtttttgtaggatgtgagataaagagaataaatattttaggattgggtgttggtgggaaaatttgttggaagcgtagtattggttattaattttgtgtttaattttttagtattagggtgaaagtggagacgtaattttttttggaagacgttagtttttatttttaacgttttcgagatacggttcgtaattaattatgacgttatagttaatcgttaacgcgaaagtttgacgttttagtcggttttatttcgttgtttcgtcgcgggcgtagagttggcgttttagtttacggagttggttaattttttttatcggtttttggaaagggttttaagttttttagtattcgacgttgtttgggaatttcgggcgtttcggttttttggtcgtagaggtaggaggcgtgcgtggtaggagggttcgggttatatatttttaggttttgggatagaatagttacgatttttgggataggaattttttttttttttgttaataaatttttaattttttttttagattcgatcgtatgtttgttatggatttcgttaatatttgttttagtttttagtcggatttggatttttgtttagattgcggttcggttttgtttttgttcggggtttaggatacggttatttgtattcgttgtggttttaatattaacgttcggggtgagaggtttgtacgtaggggttttggcggagggcgtagggtcggaagtttggggaatttaagatcggttgggttgaggaggggattttagagtaggatattaggcggttgtatatttggtttagcgatgaaaattgagggaaaggatgtagggttttttggtttaattagttaggggaaaggggaggttttcggtgttagttgtttttggttgtttttataattagtttttatttgtttgtgtagattttgaggggaaggttgtgaagatttcggttgtgttttattaattggggatagttatgtttatgtcggtggaggaagggtttgagtgttagggatttgtggtaagttaatgagattaagaattggttttataaggtgggtaggaaagaaatggaggagtgattgtaaagttttggagagttttgtgtttaattttaagagggaaaagagatgtaaattatcgacgtttgagaggcgtgatcgtttgatttttgtgggaagtaaggggatatgattaggtttttttaatttattagtttttttttaggttgataggcgttgttttcgatgtggttatgaaggaatggtatattatattagatagatgcgtttagtcgatgaagggtaaattgttttttatatttgtattaattgtaagtgggtatttttttttttttttttgtttagtttgtttgttaattaaataaatttagtgatttatttttttgtacgaaatggtcgttttttttggttttattttttatttttgtgtagttttggtaatagggagatttgtagttgttttttatttttttaagttatatttttttaaatttttttataattagtgaaataaattttttaggattttttttttttttttttttttttgatagggtgtcgttttgttatttagtttggagtgtagcgaggtaattttggtttattgtaattttcgttttttgggtttaggtaatttttttattttagtttttaaagtagttgggattatagatatatgttattacgtttggttttttttttttttttttttttttttttgtatttttagtagagatggggtttttttatgttttttaggttggttttgaatttttgagtttaagtgatttatttattttagtattttaaagtgttgggattataggtatgagttatttcgtttgatttatttttaggatatttaaaaggaaatgaagaaaaaaaaaataatataagaagtaggtattgtttagtggttagtattttatattgtagtttttaatcgtagttaaggtagttttttttggagagaattagttatatatgatttagagaatatgggttttttgaatgtttttaagattttatttttgtttttggtgttttgtagttattatagtatattaaaatacgatttttttttattttgtttgggatttgttggattttttgaaattgagagtggattttttttttattaattttggaaaattattagttattattttttttaatatttttttttttttatgtttttagtttttatattttggatttcgaattagttattagaaagaggttttttttttttgttttttattttttttattttttttttatatttttaattgttgttttttttatgttattttttgagtaatttttttaggttttttttttatgttattaattttgtttttagtttattttaagtattattattttttattattgttattattttgagttttatttaattattttttaaatttttttaatttttaaataattattagttttttaattatattttaaattgttttttttattattttttaaatatatatttaaaatattaaatatggttattatattttatgttttataattttgatatttgcggattttgtgtgtttgatgttgttgttttttgtttttgttgttttttttatagtgttttttttttttgttttgtgatttttgattataaattcgagttttttagaatttgaattgtaggaattttttgaggttttgggcgagtgttgtatttttagtatttgtgttttttttttaggtgttttgaagtattattaagttggaattattttaaataaatttttggttttatgttttttggagtagatagatagtatgaatttgagttgtaaatttatgtaagggttagtttatagttagaaatttttaggagagagttttttttttttttatttattgagatagttaaattttttttttatagagttgaattttttttttttttgtttatttttataagaaagggtagttttttgtagtttttaaatttatgtacgggattttttattagattttatatattttgttttttattttttatgtttttagtgattgttaaaatagtataaagggtattatagtgttattgttacgttttatagggatattagttttaatttttttgtttggatttttggttttatagaatttttaattagtgtgtagattgtttttatttttttgttattttattaaaggattaaaaatatttatagttagatatattttttaaaagtattttttttttattattggttgttattttattaaaaaaaaaaaaattttttttaaataaaaagaagatttttttttttagcgtgtggtttgtttatttttttaattttttttaaatgagtagaagttttaagtttttataaggtttagtttattttttttttttttttttatagttagtgttttttgtgttttaagaaatttttgttttgaggttataatttattggatatatttttaattttagaatttttagttgttttggaattagaattggaagtttgtttaggggagttagtttttaatgatgttataaataaaagtttttttttgattatttgattgtatattttattttatattattagaaatttattttttggtgaatataataagttttttttttttttataggttttaggagaaggaagatttttgattttttttttgggtaattttatagttttttttttttttcggaaggtgaaggatattgggtttttagatgttttgtttattttgtttggttgtaatgttttgtttttagaagagaattagattattatgtggggattattattgtttttggagtatttttatttttagttgaatttttttattaaagttatatttttttataagattttgatatatgtatgttatttataatttgttttattttaaaaggaatttaaatgagtttttagagatatatttatatgaaaaagaaaagggggaaaaattaggataaaaaagtagagttaggaatgaggttaatataaataaaaagtaattgtaagtattgttatattatttaaatttatttggtttttgagtttaggttaagaaaaattaggaatttggatagtgagatatttaatagaaattttaattagatttttttagtatataaatttggataataaaaaatttgatattaagtaatgttattaagtgattattataggtgagtattttattagtattgagataaatataatatatagttgatttttgaataatataggtttgaattgtttgagtttatatatatgtggatttttttttatttttgagatttataagatagtagtatatttaagtttttttttttttttttttgagtttatttaatatgaaaatgtgatttatttttatttaatgaatagtaaatatatttttttttttttatgatttttttaataatgttttttttagtttatttgattgtaagattatatgtattataagtatataatatatatataaaatatgtgttaattaacggtttatgttattggtaaggtatttggttaatagtaaagttttgggggagttaaaagttatatatggatttttggttgtttagagggttagtattttttatttttatgttgtttaaggatgaattgtatatttattataatagatttttatatagaaagaaagaaaaaagtaaagttataaggaattttattttatagagataattaaattatattgtatatttgtgtttgtgtatatgtatgtggttttgtatatgtgtgttgttatatatgtgtttggtttttttaatggattagatatgttgaattatattttgtttttttttgtttgaattaaaaatttttaaggggaataaatgtatatttaggtttcgtattttttggtttaaatagtgattaaggggttattgtaataattattatataattgtgtggttttttatatatatttagagtttttaaatatagttattttgtttgatttttatagtaatttggagaatgggtagggtagttttttttattgtacgtttgaattgttttggtagttgatttttttgatttatttttgaaatttgaaataaatttgtttatgtttttattttattttaagtttttttttggtttataatagtgattggattaagtttaattttttagtaaagtatataggtttttttatataattattgtttatttgttaagttttatttggtatttttttagatttaagcggtataaaattttattttttgtagtgtatatatttataattttttaagttgtttttttaaaaaaatttatttgtcggtttttttggtttttgttttattatttttttttgttttttaagaaacgtgtatatatttttataaaatagtttatattgtaatttacgattatttttttgttttattttatttattattttagagagaacgaatatgttggtagtatgtaattatatttagatttataaattagatatggtatttgttaatgttttagtgttttatatttttgttagtttttagtatgtttgttttttttattagagttaaaaggtagggtttgagcgttttacgcgtttttatttttaaggcgtagtatagtgattgaaaaaaattgacgttgaacgtgtattaaattgaattgtttaaatatttataggtatagggcgaggggtagaattatatcgtttgatttttaagtgtgtttttaattgtttttatttttcgttttttttagagaaatttagattaaataaggaaagggaaataggttacggtagggttattattattgttttttaagttttttcgtcggtttatttatttagataaggtaaacggaaatttgtagtaggatttagtttggtgtatataatttcgttttcgttatatttattttgtagcgtttggttcggtaatatttatttgggcgttttttttgttttttttaggttgtgagtacgcgtgttgttttagatttttttttttttatttatattcgtagtgatatttttttcgttaaatttgttttttttttttttagcgtttgcgcgttgttacgttacggcggaattaatttagcgacgtttgcgttttgacgtatttggtgtcgtggaagggaaaaagggggattgtagtatgcgttatattcggaagcggcgagtcggaagtggggttagttaggttatttttaggggtggagaagcggaggtttaggaggagggggaataaagaaggtggaggattttggttattattttgaattcgatatcgttttttttagattttagcgatagaaaaagggaagggtgttttatttttttttttttttttttttttgttttgagttttagttatggtcgaggtaggggttgggttgagcgagatcgttattgagataacggttatcgtgataatcgagttcgtgagaaaggcgggggggcggtgttgtttaggggtttgggagatattgggagggaggggatagggattagaagagttgttggaggagttaggtttagggatatgggaggtgtggggttgaatatttagggttgggagaatcggaaggtattggagttatttggagtggtagagatggtgtaggaggtaggttaaggaatttgtaatagggaggtatagttaggatataggtgttgttgtttggggtggttatgtgtgtaagtaataaacgaaagggaaattgaggattaaggagttaggaagatgttgggaggaaattaaaggtagtgtaagaaagtatggttggaggttaatttattaatattattaatattgatattcgaataaatatttattgaatggatgaatgtaaaaggaagtggtaggaatgaggaaataagaaaaggagatgaaaagaggtattttgagaaattagagagtaaagatgtaaatggagaaataagaagtatttatttaaaaatatgttaagttgtttttaaagggagaaggttgtattgggtttaatatttttggattaaaggaagtttagtaattaatagattagtaatatttgttattagagatgttaggatgttagagaataggtggataagaggtagggagggttggagtttgagaatgagagaggttttgtttgtttttttaagagaaaaagaataggggatttggaaaaaggaagggagattaaagattaggtgttggggattgaaaaataatttttatgtattaatattattaaggatgatttggggaggaagacggagaaatagtaaggattatatttttttttgaagagttgttgggattttttttaggttaggaattgtgtttttttttatattggtggtataagaataggaaataatatttattttttaagggattatttgaggtaaaagatttgttttgttttattttttgttagtttttttggtgttatgtttatggtattgattgagttaaagaagaaaagagaggaggttttttgggagggagtgggaaaggttagtaagaggggattagataggtatgtttatttttaattttttaggagaatcggagttttattattaaatttcggaaacggaagttagagaaaaaggtagaatggataagtgatattgtggataatgaatatatgggtcgtcgtttatttaaatgtgagtaattgttggttcgtagtagttttggagttttggttttttttagtatattttgtatttatttatatttattggttttttagaagtttttagatgtttatagttttgttatttttttggtggtgttgtggtattagggaaagaggtagggaagggttagaattggaattgtttaggtttgatagtaagaagtgttagaggtgggagaagtggggttttgaattcgtggttttttaagaggataagaggggtggggtttgagttttagagggtgggtttggggaagttggattttggaaggtaggagaaaataggaatttttattgagtttgagtgggaatggaattgattatatattttatttttttttttttttaattgggtttttttttttaaatttaggttgttgtatttatgagaaatttcgggtttttggcgagagttttacggaaagtgatgaggaggaagaagagggttgtggttatatatattgtgtacgtggttatcgtaaaggacggcgtcgtgtaattttaggatcgatttttattatttttttttagttttttgattttttttagttttttttagggttaatgtagtattaaattttttttttttttagtatttttgtgtttgtttggttttaaatgtatttatgtggttatttttttagtttttttttttttttttttttgtttgatagagggaagaggaagaggaggacgaatagagattttgaaattttgatttgttgttattttagaatttagttttttgggtttttttagtttttatttttttttttaatatttatttttttttttcgagggatttaggtattttggttttagtgttttttttttgtttttattgttaaattgtttgttttgggatttagttattttggttttgtatttttaatatgagtagcgaatatttaaattgggtttttaatagttttagtttttattgttagggttttagttagattttaggaatttgcgttttaattttgtttgttaattttggtttagagttattttattaaaatatttaattttaatttttagtttttgtttgtgagatatgaggttttataggagattttagagtttttagtttttttttttttgttaattttttttatatttttaagaggagttagaaaagaggtttttgttatttttattttttatggaaaatggaataagaaataattatattttttttttttattttttttttgttatttaggatttttgataaagttggtttgagattggttatttagagtcgattgttttttttgttttttgttttttagttttagagatagatttaatatagttttagggatttgggtttttgggagaggaaggaagagggagggagtaaagagattggggtatgttttttgtagtatatttttattttttattttttagattttgattttttcggtagtttagatgtttagtttttttggtttttttttattttttattgggatttggtttttatttttcggtttttttgttatatatagttatagagattagttaaatttatattattattgagattttatttattgttatagatgtataaaataaataatttaaaattataaaatgtgttaaatatgggtttatttatatttatggggaagggtgtgagattatatataaggatgagtttggagatgtttgaagtatttttaggttgaggaggagagaggggaaatagtattattggttttttttcgtgagtatgtgcggggagaagttttaagaaggtttttatggaaaaaaggttgtgagtatagaaagtagttataggaggttggggaattagtttgtttttttttattttcggattttgtaaaagaggtataaagttttttagagggttatagggtttagattagagttaagttttttgttttaggagaaattttagtggataggtagggtagtttagtttttagatttgtggggaaggttttgagtttttttggagttaggagtggtaagagtgggagttaagtatttgattagtagagtttttatgtaggaattatggttattttattaatattgatggggagggtttgttttttattgtaggtttagaatggtttgaatgggagaagttaggaagtattgtagtagttgtaggggagagaagattttgagagttagaaggtaggaatggatttggttttgagtagggacgtggaaacgtggagattaggtgaggttttattattttggggcgaaaatgtgggttgttattaatatttttgtaatgggcgtgtgaatgtgtttttagaaatgagtggggaattttatttttaaaaagtagttgtagggttagtggtcgggttaaatttttagttggagacgagatttagtttttcgttggtataatgcggagcggagtacgagggtcgtaggtgtagaatagcgggaagatgcgtttttttagggggttaggcgtttggaaggcgtaaagtaggtcgagtgagcggtcgtcgtagaaggttacgcggtttcgtttttagtttaggtttacgcgaatgcgtcgcggcgggggtttaatatcgtttagtagggtgggttcgggtgtcgtgagggtttataggcggtcgtcgcggttttttacggtttatacggttttcgtagggtatagttttacgtagtttttgcgttgtattgatttttcggtcgcgtttattgtatagtggtttttttcgtcgttcgtattttttttagaagagtttttgtaggaggcggcgttcgtagtttttattttttagtagtggcggtcggtttcgaagttttgcgtatttagtatagttgggagttgatcgaagcgtttggggtcgttagggggcgcgggcgtttttggtggggttagttgtacgttgcggcggtcggcggagatgagtaggcggcggtgtgcggttttagggtttagggttaggtcggttggagacggggaggtagggagaggattttatgagagagttttttaaattataggcggggtagggtggagaatagttaacgaagattacgtaaaagattgagagttagtgattatataatagtttaaaaggcgattgtaggattaaaaagaaggaaggtatatgaagagtagatttgggtaatattagattttgtattgatgtattatttttgtagaattggatttggggaaggattatattggtttagtgtagggagtatagtaggaagattaaatgagaggttgtttcgtttgtggggttgggggaggaagagtgaggttgatttgatttcgagggaggagtaaggattgatattttaatttgtattatttggggtggggtatgggagttgggttagtaaaatggggaaggtttatttaaagagaaagtcgtattgatattggaattttaagtaatgggaggggtatagggaggaatttaaggtattttgagaaattagtttatttatttataggaattggggggtggggtggatagttttatttttgtaggggttgtggggtagaggaggagagtaggtggtgatagttagagattagaaaaagaattattggttttatatgtatggggtgttttgaagaaaaatttttggattaggggtgttagaagtaatttggattgggtaagatggtggatgattaagatggtggattattttttttaggtagtttaaagaagggtagaggtatttttttttttgggagtgagtgaggaaagaagggttaaggagatgttggggtttttttttagggaggagtgacgagaggtggtggaagtagagatttttgagaggtatttaatttttagggatttgttgtttgaatgtatgaaaaaggaagagggaaaatggttggaatatgaggaatcgaggatagatattgttataggttgaattgtgtttttttttattttatatatatatataaagataggttgaagttttttaaattttagaatgttattttgttttgaaataggatttttatataggtaattaagttaaaatgaaggttattagggtgggttttaatttagattgttgatttataaaaagaggaaatttggatatagagataaatgtatataaaagaaaatgtgtagatttattatttaaagaatatgtgaggttattagaggttaggagataggtatggaatagattttgttttatggtcgttagaaggaattaatattgttgatattttgattttagatttttattttttgaattttgagataaatgtttgttgttttagttatttattttgcggtgttttattagagtagtattaggaaattaatgtagatattaaaaaggatttgattattttttagggttaaaaggaagaaaatttaatatagatttttatttaatttttttttttttttttttttttttttatttgttagtttatgaagtatttttttgattattggataatttttagggagattattttttgaattagatgatttggatgttgggattttaaatttatatagatgaggggaagggttaggaaattagttttttgattttaatgtttttacgtatattttatttatatttttggaggaagaagggatgagattatattttagaaaatttgtttattaatgggaataaaggtgtgggtttagtgagaacgtgatggttatggtagttggtgagaaaaggagggaatagaaaagtggaatttatcgtttttatgttttttttatattttaggatgggtagaaataaatatggatgtgagttttgggttttattttttggggtatttttttttattttttttttttttaggtgagttttgtttgagttagtagtgtttttttttattttttagagtgattttatttttttatatattgtgttttttttttttttattttttttttttattttttatgatttttttttttttttattttattattttttttttatttttttaattttatttttattgttttttttttttttattttttaagggtttttaattttttttttttaggttcgtttatgattgttttttgtttttagagtttttgttttttttgttgtttttttagttttattttttgttttttttagcggttttatttttatttattttttttagtgtattttagaaaaatatttgtttttttttttttttattatatagattaaatatatatttagagttttcgggttaagagttggtatataaaagttttataataaagttgtttttttttttgtaataaaagtttagtggtatttattgggttttttgttttgtgtttttggattttggttagggaggtagttagatttgaatgtgttttaaaaggtttagtagatttatagagtattatgggagttaggagagggtattggatgtttttttttaaatattgggatatcgatttttttattttattgtttagtgttgatggttggagtaggtcgatatggtggagcgggggagagagaaataatttgtataattgtgttaattatttttagattaattaggtttatgaagattttaaagggtagaagtaagatttaagattagtttggttgttgggaagaagttagttaggagttttagacgtttaggggtcggtcgggtaagggaatgggttggttagtggttaaggagtcggggtttaggagaggcgcggtgggtagatgggtggtaagattgggatgtggagaggagttagaggttttagcggttgttttttcgtatttcgtttttatttttggtcgtttttgtttggggttttgggaggagtcgaaataataataataaataatatagggtttagtttgagttagagttcgagattaatttttacgacgttacggggaggtttggatatgttttaattttttgttttttttttttatttttttgttagtttttttttttttagtttttttttcgtttttaatttattagtttagttttttgttttcgtttttttaagtaggttttgttttcgtttattatttttttaggatttttttttatttttagttgggtcggttttttttttcgttcgtcgttttttttttttcgttagttttttttttttcgggcgtttgcggttgttttgttaaaatttttgtagtttttatgtttttcgcggcgattttagggtttttcgcgttttattcggtattttttttttgtttttttagttttttttttttagttttttttataaggtttaggtatcggtttagtttttttttttgtggattaagtgttaattttatttatcgttttttcgggcgttttttattttgaggatttagggttttcgtttttttattttttgtttttttttttttattttattttttgtttaaatttttatagggttttcggttttagacgtgttattttcggttttttcgggaatttttcgtttttattaataatttcgcgacgcgcgtttagttttattttttcgggtaggtttaggtagtttatggtggggatgcgtttttttcggcgttttttcgtacgggttttaggtttagttagtttttttcgtagttcgcggttgattcgtatttttatcgttagtcgtatattagattttaggttgcggcggggatacggtaggtcgtagtagggataggcggtgggggaagtttcggtgtcggtcgtcggcggagttttttagcggcgggttagatacgcgcggtagaagttgtgttcgtacgttagaagtatcgggttttcgaaggagttttcgtatagaggatacgtcgttagttgttttagacgttttattagtttcgggtttagttcgggcgtatttatggaaagttaggatttggacgtcgtttttttcgcgattatcgtgatcgttttcgagcgcgtagatggcgggtcgtttttgttgtttgttgtgtagatgttttttttttcgattttcgtattaatttttgtcgtttttcgttttttttttgggattgtttttttttttaattagagttttagtttcgttaaatttttttattatattaggttttatagggagggaggaggtttttacgggaggtaaatattaggttttgcgtaacgttttatttggtttttttgtttttcgggtaaggtttgggggagtagggaggggagaatagtatatttggtttttagagtttaggaggcggttattagagggcgttttggggcggggtagttttgtgtggggagggtagttttttgtgatttttcgaagagttttaattttattttttttttcgtttgtggtacgcgtatgggtcgggtgtttaggtttatttttggtatgtgcgtttatattgttaaggtgcgagttattttaggtggttggtatatttatatttgggggttgggggtcggaagtatagattttggtttgtgtggttttggtaagtttttgagtgttgatgtgtggtttttatttttggtgtttttcgtttttttattttttttttttatttattaagggtttaagggtattttgtagttttggggtaaggggtggggagtaggcgtttatatttcggttttagggagtcggggtagagtttttttagttttatttttggttagtttttagggtttttttttatttttttcgtaagtttttttttttggttttttttttttgttttttttcgtgtgtgattttattattagttttttttttttttttttttttggaatgtattcggtattatttattttaattttggtagtttatagaggtttagagaattggaatagttaaggttatatagtaagggaatgattagaagtggagttttattttggttttttgatttgtgtttttgttgtgatttaattttgttttttttagttgtagatttttgggatttttttttgttttttgatttttttttggtgtttttttgtgtttttattttttatttttattttttttttttttttttatttgtttttttttttattttttttttttttttttgtttttttttttttttagtttttttatttttttaatgttaggtttagttaattggatatttatgggggtttgtgtataagtaaatatttagatgtttataattatgattatttatattgttatataatatgtgtttgtatttattagtgtttaaatgtttaaatgtgtataaatttgtagatagaagtatttatgtaatataaatattatagttaaatataatgtgtatgaatagttttatatgtattgaatattattgggataaatgtttagtattatttaggaatagacggatatgtttaaagaaaataggtaaagagatagatattttattattagttttattattaataagaataatagtataatagtagtaagtttttatggagtagtaggattttattaggtattttttttaggtattttttttttgttttttttatatttatcggggagatatttaaatatgatattttgataaataaatttatataaataaatatacgtatatttattttggaataattttttcggtttagtgtttataaaatatatagatatttaagtataagattatagttgtgattgaaatttattttgtaaaagatgtatttttatgttttgataggtagtatagagagatagtagtatgagaagtgattagtttgatattgttggttttggagattgaggtaggaagttataagttaaggaagtgggtaatttttggaagttgtaaaagacgagggaatggattttttagtagattatttagaaggaatttagtattgttgatattttaatttttgtttagtaagatttattttagattttgaattatagaataataaagtaataaatgtgtattgttttaagtttttaagtttgtggtaatttgttatagtattaataggaaattaatatataagattgtttttttttttttagtttttgattttttgagtttgtttgtatttttgtgttgttgtattttttagtttgttatattttttggatgtttttgttttttttgattttttttttagttttatgttatttttttttttttattgttttggtttatttttaattttaaggttttttaggatttttttggatttgggtttgaagtattggagaaatgtttttgagattttttaagaattttaattgttattaatttaagtgttttgttatggtttttatgggtttgttagcggttaatagttttagttgtatattagaattatttgggaaattttaaaatttttgatgtttaagtgatattttagattaattaaacggatattttgggggtgggttttaggtgttagtatttttaaaagttttttagatggttgtagtgtttagttaataggagaattatggttttgaatgacggttgtttatgtgggttggttattttattttgttttttgtgttttggttgtagtgttttttatttttcgtttttcgagttattgttggtgcggttgtatcgtttttgtatttattgttttttttgtttgggtttttgtttttttagagttttatatggttttttttatttttttatttatgttttaatttaaaggtaatatttagagaggattttttttattatttgtattttaagtggttttttttaaaggtatttattatttttttatttatatttattatttttatgttatttattattgtttgtagtgatttatttatggatttttgatgtgtttttgtttaatagaaggtgagtgaatagggatttaatttttatgtttgttgttgttttttttgtatttagaatagtatttggtatatagtgagttttaataaatttaggtttagttgttgaattgtttattatattgattggataatttgagagggttatttgattgattttgtttagatttttttattttttttaattaatagttatgttttattggtagatgttaggtatagtgttgggaaacgtttaggtgttataagatatatggtgtttagtttggttaggaagtttatgattagttgttatttgttttttataattagatggtgaggatttttgttaataaagtattagtttaatttttacgtttaggttataatgagtttatatttaatggttttaggatattagtaagggaaaaggtatttggagatagattttgtttggaaatattttattttttaagattttttttttttttttttagaatttttaataattttatatttgatgttttaattattattgagtttattttatttttagagagttagaagggtggatgtgattttacgtgtgttagtttggtttggtttgatttagttgattatgacgggattttgtttttttgttaggatttatattttttttttttaatgtaggtgttttttaaataattgtttttatttttttttaattttttttaggatttttatttgtggtgttgtggagtgtgatagtttgatatttatgtatggtattagggaatgttagaggtgggataggttttgatttatttttttttttttttttttttattttttttttttatttttttatttattttttagttttttttttttatattagtaatatttttatgtttttaaaagttttattagtttttagaagttttttagagggagagataagtatgatagaggagtttgggagattgattataggatagttatggtttttgtttttaggaagtgtgataaggtaggtaaagtgtatttattattaataaaatttagtattattgaattagggtgtgtaagaaggtagataaagtgtatttattattaatttaaatttgttattattaaattttaaaggtgtagtgacgggggaagagtgagggaggattttgttgatagattgaaggataagtgggaattattttaggaagttttttaggaggaggtgatttgtaaaagaagtgaaggttgtgttgattggaagagaagtgaaaaggtttgaataaagaatgtgaagtatttttggggagaaaattggattgggaaaagaagggttaggaggtaagaaattaaaatgaaggagattataatttttttttaatttttatttattatgttttttttaaagattttttttaattttgattgtttttataatgatttatttttttaaggatttggatgtttatattgtgttttaatatagttggaaattttattagattagagtagtttttttatgtaattattttaaggattttgagtaaaatttgttttgatgggggaggtagttttaggaggggtggtttgaggtagggatagaggaagaatatttagttagattaatttaattaattttgatatttaaatatatgattatgttatagaaatgttatttttatagtttatttttttatttaattttataatagtcgtgaggttaagtttagttatgttatattgaggtttttgggattttggtatggtaagggatttgattaggtttaaatagtcggtaggaggtagagttaggattgaaatttaaatttgttggttttaaagtttatatttttttttttaaatattaattttttttttttgagattttatttttttttttttgttttttttggaaggtttttttttttttttttttttaaatttttgtttagggttaatagtttttttgaaatgttgtttattttttaagtttatgtaggtgtttatttattttttttttttttaataatttatttattaatgttattaatatttttatttattatttaaatttttttttaaatgtttattatttgtttttttagtttttttatttatttatttatttattattattatattttaagttttagggtatatgtgtataatgtgtaggttagttatatatgtatatacgtgttatgttggtgcgttgtatttattaattcgttatttagtattaggtatattttttaatgttattttttttttttgtttttattttataatagtttttagagtgtgatgtttttttttttgtgtttacgtgtttttattgtttaatttttatttatgagtgagaatatgcggtgtttggttttttgtttttgcgatagtttattgagaatgatgatttttaattttatttatgtttttataaaggatatgaatttattattttttatgattgtatagtattttatggtgtatatgtgttatatttttttaatttagtttattattgttggatatttgggttggttttaagtttttgttattgtgaataatgttataataaatatacgtgtgtatgtgtttttatagtagtatgatttatagttttttgggtatataattagtaatgggatggttgggttaaatggtatttttagttttagatttttgaggaatcgttatattgatttttataatggttgaattagtttatagttttattaatagtgtaaaagtgtttttatttttttatattttttttagtatttgttgttttttgattttttaatgattgttattttaattggtgtgagatggtattttattgtggttttgatttgtatttttttgatggttagtgatggtgagtatttttttatgtgttttttggttgtataaatgtttttttttgagaagtgtttgtttatgtttttcgtttattttttgatggggttgtttgttttttttttgtaaatttgtttgagtttattgtagattttggatattagttttttgttagatgagtaggttgcgaaaatttttttttattttgtaggttgtttatttattttgatggtagttttttttgttgtgtagaagttttttagtttaattagattttatttgttaattttggtttttgttgttattgtttttggtgttttagatatgaagtttttgtttatgtttatgttttgaatggtaatgtttaggtttttttttagggtttttatggttttaggtttaatatttaagtttttaatttattttgaattaatttttgtataaggtgtaaggaagggatttagttttagttttttatatatggttagttagtttttttagtattatttattaaatagggaattttttttttattgtttgttttttttaggtttgttaaagattagatatttgtagatatgcggttttatttttgagggttttgttttgttttattgatttatatttttgttttggtattagtattatgttgttttggttattgtagttttgtagtatagtttgaagttaggtaacgtgatgtttttagttttgtttttttggtttaggatagatttgacgatgcgggtttttttttggttttatatgaattttaaagtagttttttttaattttgtgaagaaagttattggtagtttgatggggatagtattgaatttgtaaattattttcggtagtatggttatttttacgatattgattttttttatttatgagtatggaatgtttttttatttgtttgtatttttttttatttttttgagtagtggtttgtagttttttttgaagaggttttttatattttttataagttggatttttaggtattttattttttttgaagtaattgtgaatgggagtttatttatgatttggttttgtgtttgtttgttgttggtgtataagaatgtttgtgatttttgtatattgattttgtattttgagattttgttgaagttgtttattagtttaaggagattttgggttgagatagtggggttttttagatatataattatgtcgtttgtaaataggaataatttgattttttttttttttaattgaatattttttattttttttttttgattaattgttttggttagattttttaatattatgttgaataggagtggtgagagagggtatttttgttttgtgttagtttttaaagggaatgtttttagtttttgtttatttagtatgatattggttgtgggtttgttatagatagtttttattattttgaaatatattttattaatatttaatttattgagagtttttagtatgaagtattgttgaattttgttaaaggttttttttgtatttattgagataattatgtggtttttgtttttgattttgtttatatgttggattatatttattgatttgtgtatattgaattagttttgtattttagggatgaagtttatttgattatggtggataagttttttgatgtgttgttggatttggtttgttagtattttattgaggatttttgtattaatgtttattaaggatattggtttaaaatttttttttttggttgtgtttttgtttagttttggtattaggatgatgttggttttataaaatgagttagggaagattttttttttttttattgattggaatagttttagaaggaatggtattagtttttttttgtatttttggtagaattcggttgtgaatttatttggttttggattttttttggttggtaagttattgattattgttataattttagattttgttattggtttatttagagatttagtttttttttggtttagttttgggagagtgtatgtgttaaggaatttatttattttttttagattttttagtttatttgtatagaggtgtttgtagtattttttgatggtagtttttgtttttgtgggatcggtgatgatattttttttattattttttattgtgtttatttgattttttttttttttttttttattagttttgttagcggtttattaattttgttgatttttttaaaaaattagtttttggatttattaattttttggagggtttttttgtgtttttattttttttaattttgttttgattttagttattttttgttttttgttagtttttgaatgtgtttgtttttgtttttttagtttttttaattgtgattatagggtgttaattttagattttttttgtttttttttgtgggtatttagtgttataaatttttttttatatattgttttgaatgcgttttagagattttagtatgttgtgtttttgttttcgttggttttaaagaatatttttatttttgtttttatttcgttatgtatttagtagttatttaggagtaggttgtttagtttttatgtagttgagcggttttgagtgagatttttaattttgagttttagtttgattgaattgtggtttgagagatagtttgttataatttttgtttttttatatttgttgaggagagttttatttttaagtatgtggttaattttggaataggtgtggtgtggtgttgaaaaaaatgtatattttgttgatttggggtggagagttttgtagatgtttattaggtttgtttggtgtagagttgagtttaatttttgggtatttttgttaattttttgttttgttgatttgtttaatgttgatagtggggtgttaaagttttttattattaatgtatgggaatttaagtttttttgtaggttatttaggatttgttttatgaatttgggtgtttttgtattgggtgtatatatatttgggatagttagttttttttgttgaattgatttttttattattatgtaatggttttttttgttttttttgatttttgttggtttaaagtttgttttattagagattaggattgtaatttttgtttttttttgttttttatttgtttggtagatttttttttatttttttattttgagtttatgtgtgtttttgtacgtgaaatgggttttttgaatatagtatattgatgggttttgattttttatttaatttgttagtttgtgttttttaattggagtatttagtttatttatatttaaagttaatattgttatgtgtgaatttgattttgttattatgatgttagttggttattttgtttattagttgatgtagtttttttttagttttaatggtttttatattttggtatgattttgtagtagttggtattggttgtttttttttatgtttagtgttttttttaggagtttttttagggtaggtttggtggtgataaaattttttagtatttgtttgtttgtaaaggattttattttttttttatttatgaagtttagtttggttggatatgaaattttgggttgaaaatttttttttttaagaatgttgaatattgatttttatttttttttggtttgtagagtttttgtcgagagattcgttgttagtttgatgggtttttttttgagggtaattcgatttttttttttggttgtttttaatatttttttttttattttaattttggtgaatttgataattacgtgttttggagttgtttttttcgaggagtatttttgtggcgttttttgtattttttgaatttgaacgttggtttgttttgttagattagggaagtttttttggataatattttgtagagtgttttttaatttggttttatttttttcgttatttttaggtatattaattagatgtagatttggtttttttatatagttttatattttttggaggttttgttcgtttttttttatttttttttttttaaattttttttttcgttttattttatttattttattttttatcgttgatatttttttttttagttgatcgtattagtttttgaggtttttatattttttacgtagttttcgagttttggtttttagttttattagtttttttaagtatttttttgtattggttattttagttatttatttttttaaattttttttaaagtttttaatttttttgtttttggtttgaatgtttttttatagttcggagtaatttgatcgtttgaagttttttttttttagttcgttaaagttatttttcgtttagttttgttttatttttggtgaggaattgtatttttttggaggaggagaggagttttgttttttagagtttttagtttttttgttttgttttttttttatttttgtggttttatttatttttggtttttgacgatggtgatgtatagatgggttttttgtgtggatgttttttttgtttgttagttttttttttaatagataggatttttagttgtaggtttgttagagtattcggtcgtgtgaagtgttagtttgtttttgttggggggtgttttttagttaggttgttcgggggttaggggttagggatttatttgaggaggtagtttgttcgtttttagatttttagttgcgtgttgggagaattattgttttttttaaagttgttagatagggatattttagtttgtagaggttattgttgtttttttgtttgtttgtgttttgtttttagaggtggagtttatagaggtaggtaggtttttttgagttgtggtgggttttatttagttcgagtttttcggttgttttgtttattttagtaagtttgggtaatggcgggcgttttttttttagtttcgttgttattttgtagtttgattttagattgttgtgttagtaattagcgagattttgtgggcgtaggattttttgagttaagtgcgggatataattttttggtgcgtcgttttttaagttcgtcggaaaagcgtagtattcgggtgagagtgattcgattttttaggtgttttttgttatttttttttttgattaggaaagggaattttttgattttttgtgttttttgagtgaggtaatgtttcgttttgtttcggtttacgtacggtgcgcgtatttattgatttgtgtttattgtttggtattttttagtgagatgaattttagatggaaatgtagaaattatttgttttttgcgttgtttacgttgggagttgtagatcggagttgtttttatttggttattttggtttttttttttatttttttagtttttttaaggtttttttgttttttaagtttttagtagtttttattttttttttgtttgtttgtttgtttgtgatagagtttcgttttgttattaggttggagtgtagtggtatgagtttagtttattataatttttgttttttgggtttaagcgatttttttagtttagttttttaagtagttgggattataggtatatgttattatatttagttaatttttgtatttttagtagagatggggttttgttatgtttgttaggttggttttgaattttttattttaggtgatttgtttgttttagtttattaaagtgttaggattataggtgtgagttatcgtatttggttagtagtttttttttaagagttgtgtatttatttatttatttatttaattatttaataattatttattaagtatttattatgtattatgcgttgttttaggagttaggaagagtggagagtaagttagttatagttttttgttttttggtaatttagattttattgaaaaaggttaataataagtaagtaaataaataaattaataagataattatagattgtgattagtgttttgaagaatataaagtgggtaatataagaggaattaattggaggaggtgtgtattatttttaataggatgttagaaaaagtttttttgagaaggtgaagagagggagttagtaatgagaagagttgggagagagtaataatagtagatgtaaagattttgaagtgggaaagattttgaacgtatgaagtgggatgataatggtttgatgtgagattggagaggtattaagagttaagttgtgtaggattttagggattaggataaggagttgatcgttgttttaagagtagtggaatgttattgagtagttgtaagtgtgatatttacgtggtttaatggattgattgattgattgattgattgtagagatgggatttggttgtgttgtttaggttgattttaagtttttggttttaattaatttttttattttggttttattttttaaagagttgagattataggtataagttattatatttagtatgatttatgtattttgaagtttattttgttttagtagtttttttttttagttttttttttttaatttttatttttttttatattatttatatttaagacgattattttatttttatgtttatttttttatcggggagaataggttttttaaataagttatttattaatttgtataaggatcgttagtaagtgtattaaatatagttaatttgattttggtttttatttttattaaagattttaaagaattatagatttgtagaatgttagagttgtagggaatattaataatgtgtagtttagtttttataatatggataagaaaattgatttttagagagatgattttgttggtgtgtaagtagggaaaattttcggatttttatttgttaagaatgtaggagtaggtttttttttgttttttaggcgtttgttttaattaagaaaaaaaatattggttgggtacggtggtttatgtttgtaattttaatattttgggaggttgagttgggtagattataaggttaagagatcgagattattttggttaatatggtgaaatttcgtttttattaaaaatataaaagttagttgggtatggtggtatatgatgtagttatagttatttaggaggttgaggtaggagaattgtttgaatttaggaggtagaggttgtagtgagtaagattattttattgtattttagtttggcgatagagcgagatttcgttttaaaaaaaaaaaaaaaaaaaaaaaaaaaaaaaaaaaaaaagttaggatgttttaattggtttattggttttaaggttaattattataggttagtagtgttgtagttattgttagtatagtagttacgggtttagttgttttatttttatgtatattttatgtttattggggtttatttatgtttttttataggaaaatagtttttattttatttttgtattttaaattttatagaaatatatttagttggaaggatttattttatgtttagaattttagttttaaaaattttgagaaatagagttttttattttttaatttttttaatagaaaggaaatgaggttattttatatatgtaggtttggtagataaaatgtagaatatttagttaaatttgaattttagataaataatgattttttagtataagtattttttaaatattgtatggggtatatttatataaaatatttgtttattatttatttaaaatttagatttaaatggatattttgtatttttatttgataaatttgatattttgataaatttttagtatagagattgagagtagaagtttttaatttagatgggggatattgaggaaggtttattttttaaggtgatatttaaggggagatttgagagatgaataagagattattatgtttaaagaggagagaagggtattgtaggtataggtaatagttttgtaatagtttagaggtaagaataatttgggttaatttaagtaaagttgatatatgatgagttaggagtaaagatggtataagataataatgaagacgtaggtagagattagagtaagtgaaattttaagttttagtagtggaataaataagagtggaatgggggagatttagggttattatttgttaatggtatttttagagttgtatacggtagttattttaaagagagaaaattatgttagtaatttaggtgagaaaggatgatggtttgagatagtgggatttagtggagttgaaaatgagtaggttaatttgaagtgtattttgtagatagaattgataaaaatattgaagtggtttttgggtgatgagggaggggaaaattaattatgaatttttaatttttggaatggatgattgtgtaattgtaaggttgttatagaaatgggttatatatttaatgagttttggatgttgagatgggattataagagagggggtaaagataaagtgatgagatattttgttttagttggattatagtttataataattgttttttttttttgtagaatatttattaatatgtacgagatttgtttgttttgttttttttttttttttttttgtttttttttttattatttttttttttttattttttgttttttttttttgttttgtagttattttatttttttgatagaatcgaagttttagttagtgagatagatggagtgtaggtagttagaaatggaaaggatttttgtgtttttgtgatttatagttttttagtgggtttttaaattatttaatttttgttgtttagattttaggaagaggggaggttggaagagggaaaagaatttggattggagtagtaggggaggttttggaggaaggagtaggtattattttttagtaaatgggtaatttattagtttaaattttttattttaaaattgaaaaaattgaagtttttgtttattttgattaaattagataagaaattatatagtatgaaggaatattgatattatttagaaatagtagggtgttaagatttgatttgatttttgttagttttgtgattataaagtgaaaataattatattaaaaaatttgttttagggatgataaaagtaatttatatttattcgtttaaaagtatttattaaggatttattatgtgtagatatagtgttgaaagttagggatttagtggagattaatatagataggaatttggttttatgggaattttaaattttagcggggagaatagtttattaataaataaataagtgtaatgtatggtaggtattacgaagtaatataaagttgggaagaaagatataaatgttagtatagttttttttttttgggatgattgttttatataattttggggaatgttattagtaagtagtggtttcggatttttttttattgtatttttgtttattttattattaaaatttaagtttttgtttgttttaatttttaagtttttattattattttgtgttatttttatttttaatttattatgcgttaattttgtttaaattagtttaaattgtttttgtttttaggttgatgtaaagttgttatttgtgtttgggatgttttttttttttttttgagtatgatgattttttatttattttttaggtttgtttttaaatattatttagagagatgggtttttttaatgttggatggagtgttggatggagtagatagagttataattttaatagattttatttgagtaaagatttgaaggtggtaagagaagtcgttaagtgtttatttgaaggaaggattatttagatgaaaggaaaggtagaggtaaaggttgtgatgttgaagttgttgatgtgtttgagatttaatatgaggttatgtggttggagtagagggagtagcgggtgtggagtaggaagttagagatgggattggtcgattgtgtagggttttgttattgttaggattttatttagtattgggtgaggtgagtttattaggggttggagttggtgggaaggggttgatttttggacgtgagttattgtattggttgtggagtgtgagagtaaaggaggaggtaggaagttttaacgaatttggttttattatggggaggatggagttgttagtgattgtagtgggaagaattgtgaggagttggtttgggtaggaatattaggggtggtatgttggatatgtgaagttaggaggtttgtgggttatttaatagtgttgtgaattgtgtagttcgatgtaagtatatttgatattaggagtggtggagaaataaaaagaataaggatagtttattttaatatagtaataattttataattttataatttttaaattattaaagattttattatttttttaattattttaggagtttgtgttatattttagttatagggaggaaattgggggttatgtaggataaaggttaaagtttgtatgttgggatttaagtgttttttttttaatagtattagaatattaatttttaggagtatagagatttgaagagagtgttcgggtcgtggattatgagttagagaaattaagttaggggtatgtaaggtagtacgaggtagagtagggaaatttagtaagggaggtggtaacgtatagtgatttagaaaagtttgatgagttgagagttagtcgataataggttttatgtgtttttgtgttttggtttatatgatagatttttttttttttttttttttttttttttttggtgattagtagttaaaatattattggtacgttgttggtatttagtttgttaattagtttaggagttattttttttgattgttttttgagttttagatgttattttttttgttttttaaatatatttttttagttttgttttgtttgttttgaatttttggaaggaaaatttgttttgggatttgttttggattttttggttttttttatttagtttttttttgcgtagaatatggtatttcgtgtttttttatttgttatttttggttatttttgtaagcgtttttgaaattagcgtttggtagagttatttacgtttatgtgaggtttttttgatttttgggtggtgtatgtggtaggaggagtagggaggagttttaaggaagtagagggaaaggaatttataagagtttttgggatggtttttaggaagttgtgaggatagagttatgttgaaaggagaaaggtaaaggttatagaaaagtgaatattgaagaggaattaggtaagaataaagtttattaagttagaagaagggaatgagagggcgaaataatagtattagaaaggaatgaggttgtcgggtacggtggtttatatttgtaattttagtattttgggaggtcgaggtaggcgaattatttgaggtcgggagttcgagattagtttgattaatatggagaaattttgtttttattaaaaatataaaattagttgggtatggtggtgtatgtttgtaattttagttatttagtgaggttgaggtaggagaatcgtttgaattcgggaggcggaggttgtggtgagtcgatgcgttattgtattttagtttgggtaataagagtaaaattgtattttaaaaaaaaaaaaaaaagaagaaagaaagaaagaaaaagaaaaagaaaggaatgaggattaggagtcggggggagagatatgattttatagaacgggttggatttggggagaggattttgttagaattatggaaagtttgaaatgaggttgaagaaggagtgatggtaatattttttatatttttagaatatttttttatattttattttattatttattttttatagattttattatttttattttacggattaagaaattgaggtttagagaggtgatgtgagttgtttaagattatatagttaataagaaggtatatttttttttatattatagagtattttttttgtgtgtggtatattatatagaaaaatgagattagatatttagaagttgaggatttttatttcgtaaatatttatggggtattttttatgtgttaggtaatatgttaagtattgaagatattaagacgttttgtttttaaaagattgattttttggttaaggagtgatatgagtggtgtaaattaggtggggggcggggttgtttataggttgagggtttttttgggagagggtagtttagggaagtttttatagcggatgtttgggaagaagggaattatttttttagtgggtggtggaaggggatagtagagggtattttagggaaaagtaagtaagtagagtgtgtgggagagttttaaggagttgagatttataaaagagggatgtgtagggagttggatggaaaagttaaagaaataatggggagaatagtgatattaattaaattcgtgatttgtttaaaattattgtatagggtaaggtatagtggtttatgtttataattttagtattttgggagggtgaggtaggaggattatttagtttaggagtgagagattagtttgggtaatatagtaagatttgttttaatgaaaaaaaatattaaatgtttttaaaaggtataatgtatagttgtaataatagttgaggaggaattttataattatagtgttaaaggagataaagggtgtttttttattatgttgcggtgatggaaatttaaatgagataaggatatatttgagtttttttatatgttagatggtatgtaaaatgtttttatatatattatgtaattgaatttatgtaatagtgaaaaatagtgaagatgatttatttgggttgatatgagaagatttataagatcgtggttaaaagaaaaagttagtgtagaatattatgtattataaattatgatttatagtaaagaaatatatataggggaagggttttggttagagggagtatagagttagggtagttaagagaaggaggtgtgtttgagtttggtgtaggttgcgtgtttagggttggtattgagagggatatggagtttgttatattgagggtataatttaattttgttatattaggtaagttttagagaatttttaagtggaagtgaaatatattttggtgatataggttgtagagattgttttgtttgtaggtggatagattggaggtaggaggagagtagttaggtaggagagatttcgaggggtggataagtttggtttttggaaatagagtcgggggagaggaagtaagggtgagaaattgggttgaggaaatgagtgggtgatagatttttatatggttggtagggggaaaaaaaaggaatatagaatataattagattatttttaggatttttatcgtagttatatatgtaaataaaaagttaaataagttgatgagttaattttttaaaatggtagtttttatttttatttttattatttttaatttttttagttgttttggtgtttatttttatatttgtaaatataaggattatattattattatttgtttttttaattttaggtattatttattattgatttgttgttattaaagatatagtttttttttgtaattataattttatttgattttataaatatatatttttattatttttattgtttttggtttatagttattttaaatatatatatatatatatatatatatatatatatatatatatatatatatttttatgtgtataaaatatagatatgtaaatatatataaatatgttttgaaggattaaattaaattaggatttaggaagattatagttaaagaagattttcggtttgtacggtggtttatatttgtaattttagtattttgggaggttaaggtgggcggattatttaaggttaggagttcgagattagttagattaatatggtaaaattttatttttattaaaagtataaaaaattagttgggtgtggtggtgggtatttgtaattttagttatttaagagattgaggtaagagaagtttttgaattcgggaggttgaggttgtagtgagttgagatgtgttagtgtattttagtttgggtgatagagtaaggttttataaaaattttataaaaaaaaaaagaagaagaagaagaagatttgaattaaaaggtagagaagtataagataagaggtcgtgaaaaagtaagttatgtattggtgagtatgtgtgtggagggtagggatgaggaaaattttagaatagaattaatttagttttgtgtagaaaggaataatgaaggtaggaggtagtaattttagggttgtttgatttgaaggaaatattaaagtttttattaggaaaggggaattattaatagttagatagaagtattagattgaaggaaaaaagattatagttttatatttttagagagtattagagattttagatgttaggtatttgttatgttgttgatttattttgtagtgagttattggatttttgaaattgggggtaagggtgagattattattttagaaggtagggagtagagataataaggtttttggggtttaggtagttgaattcgtttggttagaggttattgttataaaattaataaagaatttatatttaataggttttttttagggtttagatgagtaggtttgggagttattgggaggttgtgatattaggtaggatgataaataaaaatagttagttaagaaaataagttttagagtgtttgttttggtagaataatggatgttcgggtatagttaaagttattggtttttttttttttataatttagagttattagggatttgggttacgtgtttttttttatgattatggggtgtgtgattgcgggaggttgaaagtgttagtattgtgatttggaaatatatgtttggattggggaggtggatattttggaaataaattttagattttttttatttgaaaaattttgtggtcggaagcgttggtttaagtttgtaattttagtattttgggaggtcgaggtaggtggattacgaggttaggagatcggattaattggttatggtgaaattttatttttattaaataaaatataaaaaattagtcgggtatggtggtaggtatttgtagttttagttattgtggaggttgaggtaggagaatggtatgaattcgggaggtagagtttgtagtgagtcgagatcgtattattgttttttagtttaggtaatagagtaagagtttgttttaaaaaaaaaaaaaaaaaagaaaaaaaaaaaagaaaagttttttgtattgaattggattttgtatatatttatatatatgttttaattttattaatttatttttttttttaatgtttaatttaaatattgagagaaaaaaaaagagtagtttttgatatttagaagttggtttaatagagttaaattatgttatttatttagtaggtataaattatattatagaatattaattttagataagtttatttttagattttgataaagtgagataatgtaaggttgttttataagtttttttgagtatagatttaaaaaaagatattgtgttatttataaaatattaaatatttttttttttggttaatagaaatgtttgttatttttttattaattatagtttttttttcgttttagttttttttttttatagaaaatatttatttgggtatttatttataggatttgttttgttttttaatagtattaatttagagtaaatttttatttttttagatttttttttaaattatttaattaaaatttaaattttattataggtttttttttaatatttttattaaaatgttttatattttttatggggtgtattttttattgttgtaaggagtaataaatttagtatgtttaatgatagttatgtttttggggggtttttggttggaaaatacgggtaatatttagtgttttttgttttttttttaattttttgggatttatattgaagatttggttttatgttgtgtgggagaagttggtataaaggtaggaggtgtttttagaaaggataaaattagtaatgtatttatttaataaatatttatggagtatttatatatgttatagattgttttaggtattaaggataatagataaataaagtaggatttttgaatttttaggaagtttttagttggggtagaggtgagaaatatatataaatagatcgttttgattgtggagattagtgtagtgattaaggtatgttttggggattgttatgtgtttatagatgtggtgtttaaattagtgtcggagaggagtgggggattaagaaaggtttttagggaaggaggcgtttgaggttttggaaggttgaggataagttaagaagaaggaataatgaaagcgggttagggagatgtaaatagtgtggtgagtggggaattttaggtaatttggtttttttggagtgaaaaatgggaagtaggtgggggtaggggttaggttgaaggtaggttaacgtggagtttaggttttattttttagagaagggaggtattattgaaagtttaataagttttaatatgattagattatatttttagaaattatttgaatatttgtaatttattttaaaatgtataaaattataagatggatagaaggatgaaggaatgggtcgacggaaatatatttgataaagtaagtatagtaaaatgttaatgagaaaatgtaggtggtaatatttggatggttattgtaaaatttatttaatttttttgttagaagatttttaaaataaaattttagaaaagtatagattttggtttgggtaatggaagatggattgggtagaataagtttggaggtagggaaatgagaaaggtagttgttataatttaggtgagggttgatttagatagtgttaggaggaagatgggtggagttttgtggtaggcgttaatattaaggaggttggggttttaaggattgtaagaatgaggaagaagaaagagttgaagataatatttaggttgggtgattgtgtgggggttggtagtaataatgagtataaaataggtagtaggattaggtttgggaagggggataagatgattttatgattttagagtttttatgggaatatgttttgggagtttgtagatttttggttttttaagggggttattttggtgggggaagggatttagtatcgtggatttttattttttgatatttgttttagtttttattggatttttttaggagtggagtggtttttattttttttttttagggagtagtttttttatttttttaatgatttttttatttttgttatgttttttttttttttagtttttgaaaattattttttttttttttttggttttttaagttagatatttaaatttgattttttttggagagtatattttttatgtttattatttttttttttttttgtttattttagtattttttaagtgttgtttttggtttttttttaatattattgttttttttttatgttttcgtttttttgtgggtgatagattatggagttgtgggttgaattttgtttgttaaggatatattgaagttttagttttaggtatttacgtatgtggttttatttaaaaatagggttttggttagatgaggtggtttatttttgtaattttagtattttgggagattaaggtgggtagattgtttgagtttaagagttggagatcggattgattaatatagtaaaattttgtttttataaaaaatataaaaattagttaggtatggtgttgtgtgtttgtagttttatgtgttgtgtgtttgtagttttatttattcgggaggttgatgtgggaagattatttgagttagtgaggtggaggttgtagtaagtcgagattatgttattgtattgtagtttgggtgatagagttagattttgttttaaaaaagaaggaaagaaagaaagaaagaaagaaagaaagaaagaaagaaagaaagaaagaaagaaagaaagaaaggagaaagggagggaaagaaggaaggaaggaagtaaggaaagaaggaaggagggagggagggagggaaggaaagaaggaaagaaagagagagagaaaaagaaaatagggtttttttattaagtttagatgaggttatattggattagggtgggttattataagaggagggaaattttgatatagatatatgggagacggttatgtgaaaatgttgttagagattggagtgaggtatttataagttaaagaatgttacggattgttcgtaaatattaggagttagaagaggtaatgaagtatttttttttagagtttttggagagagtatggttttgttgatattttgattttagattttttgtttttaaaattgtaagagaatgtgttattgttttaagttatatagtttatggtgatgtgttatggaagttttaggaaattaatatagtagataagttgtgtgtgtgtgtgtgtatgtatacgtgtgtgtgtgttcgtttgtgtagggaaatatcgtggaaagttattatttgttatagttattttattatatattttatgagattttatttttttaagttaattttgtatgtgttttgtgttgaaagatttgagtttgaatatttatattatatttggaatatgggaatgtaacgatatttaatttaagtagttgtgagaagtaaatggaataatgtatttgaatttatttaataaattgtttaatattgtaaatatgttgttagtagtattataattgtgtgaagaggtagaaaatattttggattgggggatggaaattttggttagggtttagtatttatttgatttttcggttataatatcgaatgaatggttaggattttttttgagtaaatgagtttttgagaggtttttaaagaggcgatttttattttttatagttgagaagagtgtgattatcgtttaaggttaaggtttaggttggaagatttttttagatttaaattttgttataaagtatttttttatttattttgaattttttttttatttatatttttttaggaattaggttttgtagtgtttaaggagggtgggagagtgaaacgaaaaggagtgagatgttgtttttgttttcgaggattttatagttaatttgcggtaagtgttgtagggagatggttgtagtggttttgggagtgtgtatatttttttaatagaaagtattaggaattttgtttggggaaggttttttggaggaggtgaggtggagttggtttacgaaaattgagtgggatttttaagatattagtttttcgcgggaaaagagaaattagggtatggttttaatttagtaaatatttattaattaagtattttattttagggttcgtgttaagtgtttggggttggtagagttaggaagtataaaattaatttaagatatttgggaaagatttttttttgtagtaaggaagttgaatttgtatataatgaaaggaaataaggtaaaaggcgcgaagtttatgattatgacgagggttgtgagaattgtaaatagggatttgggtagtttcggttgattttgaataaaagttcggaggggcgttattttcgggtttcggtttgtgtgtttttagttttttgttgtttttttcgtaggaaggtgaaggttgtttatgtaatcggcggcgtttcgcgggcgattgggggaattggatgggggagtttggttagggttgattgagcgtttttggaattcgtgtttcgggcgttggtttattttcgtttcgatatttgggttcgttttttcgttgcgtagttacgcgacgggtagtagcgtgggttggcgggcgattttttacgttttttgtaatatcgttttttttttatcggagcgaggaggtaggaaaagtttagagacgtttggttttattcgtttatttagtttttagtcggtttgaagggaggaagaggaaggaatttataattattttaaattggcgtaaatggtgggttttattgtttagaggttatttcgtttttgcgtttttaattttttcgtttttttattttttttgggtttatttaggaaattggagtagtttttttttgggtttaattttagttttttatatggtaatattaggaatgattaagatttttgttgcgggtagtggtgatgtgggtttgagaggaggatgtatttggtcgtgggattaattttggtttttgagtattatgaagaattagaaaagttttgcgtatgtcggtttttaggatggggtttagatgggttaaagttttgtgtaggtttacgggggttgtaggaggtaaaatggaggaggagataggcggataagttggggttagtggtttatttttttgtgtttgttttaatcgagatgtagttggatgtttgtacgtggtagtttttttaattatttgttgatagacgttcgtttttagttttattttgttattaattgtgttgtaatgaatagttttgtgtatagttttttagtgtatttgagttttttttttcgatttaggtatattgtaaggagagaggaattgagatagaaggaatatttaaagtagggttagagaaattaggattggattaggaggaagttcgaagggtgtaatttttttatagggttgttggaagtttagttttaatttttttagttgtagtatattttaaattggggcgagaagcgagtgaggaggagatgtagaggaaggtaaagaataattttagcgatttagggtgattcgggtgtcggaaaatagaagttggaaaaaggagatttgtttcggaaaggaggtatggaaagtgtagatgtgggttttcgaggtggcgtcgtagaagattattttttcgttttagtaatttacgcggacgtttattttgttcggatagatcgggagattttcgcgggaatcgttttcgatgagcgtttggtattgggagtcgttgttgtgtagttttacgaagtcggttaagggttttatttttaggaagtttcgtttgggaattagttttaaggttaagtttagtacgtaggtttcgttttcgggtttttggagtttcgttttttaggcgtcgcggtcggagtaaaggtttagcgagtttagtatttagcggaatttgtagaagcgtcgggggttgtttcgtttttgcgaatcgttttgggatgcgaggtttagcgttattattttattttgggaaaggatgagattcgggtgggtcgaggttgcgtttagtgttataggggtcgtgtgaagatgaggagaaagaggtggttaatttcgggttaagttgtttaaattttttatttttttttgatattttcgttttattattcgtttcgttcgatgtcgttagagaggttttttttttttagttatagtttttgtggtttttagagaagttttaggttcggtttcgtttttttttttttaaagttaatttttaaattttataatgtgttgttttgtgggcgtagagagaagttttttattggtggtggtggtgagattattttaatattcgaagatgagattattttttttttgtttatttttcgtggtttttaatttttatgtttaagataagaattgagtttagtataagaggtgttaaggtttagattttttgagggttagtaattttttaaagtggagttttttaaatatagggatgagtgaaagtgttggaatataaaaggaggaatagttatttttcgttatatatatatatatttttattaggattttacgtttagtcgtagtttattaaagttagaagtgtttttatttattttttatagaggtttgcgtggtggttttagtttgttaaatattttagaatggggattttattttatttattgatttattaaattttattaattaattttttttgttgatatgaggggttgggagagaagggggacgtgggaatgtaaggaagagcgagagtggtcgggtttatggggtttgatggattgtgatttaggttggcgttgttcgtttttggattttatttttggttgaattggtgttttcggtaaatagttgtttaaagagtgcggggattgttgtagggattttttttttttattaggcggtattatagttaaagtgataagaagttaagcgtggggcgggtggttggagattgtttttttttttttttttgtttaagaattcgtttattttttttttaattttttttattattattttcgtttttatttttatttttagtagttcgagtttttttattttttattttttcgatttaattttattaagttaagaatcgtggtcggttttagttatttatttagcgttattttatgtttcgaagttcgtggagtattatcgtttttcgtgttttttgagttggtttagtttgaaggaattttataaaattaagttcggatcgttgttagttatttatttagtgtcgtatggagtttttcggatagcgtaacgttaaatgttttcgtattttgagagttcgttttttgattagaaattttattataagaggttaggagatatattggaaaagtgatttttttagtagacgaggttcgaaatagggagtgggatggggttgaagagtggtgatttggtggtttcgatgtagttttgtcgtttttgcgggagaaggaaaggagaaaagaggttagcgggagtatttcggtagtaattttttattgttagatagtatagttgagttttatatatagtaggagggatggaggtgaaatttaagaaagtatatttgaataagtcggagcgttttttgttttttggtagaggtgtaatttggggaggaattgaggaaatggaataaatgaatttatttatttatttatttattttatttagtggaattgggtggatatagtattttgattatttgtagatttagaggttttttagtatttagagataggatttttatttgtagaagatgattcgggttttgaggttttgtttattttatgattatttttttgtaataagttttttaaaaattggggagagaaaatttatttggttttgataattagaagttgtaaattaaaaataaaaataagtattttgttattattaattagaatagttaatggtttttagtgggatttattttttatttagggggaagtgtggaaattttttaggttgttttagtgataataagagtgtggttttttattggtttatagggttttttggggtttgggatattaagtatttaatagggtaaaagttatggagtataataaagatggtttttttaaatatcggtagttttttttgtggagaaatgttggtggaataggatttttaaattttgttttttggttttggaatgtattttgtagtttttggttttggagaaaggagttttaatttttttttttttatttaatgattatatgatttgggtaatttattttttttttcggaagttatatggattttattgtaagttgtagataataatatttattttggaggatagttgtggggttttgaaatattagatgcgtatatagtggttttttaagaaatggtatttttattgttattattttaggtggtagaattatatttaatgattttagtataggttgttattatagtgggtttttattttttgagttgtattgattttatatttagaggagtttgtttcgaaatttggtgttttgtaggggtagtaaatattatagaggtggagttgttttttttttgttttatttttttttttttgtttttaggagtgaagaaatatatttgtaattttttattatttttgaatattttaaagtttgggattagtgattgttttgtgagttatttgagtttaaaataataaaataattatatgtttgtttttttaattggttgaggaatcggtatttatttatatttggtttttatgtaattatagagatataattttttttttttttttattttttttaaatggtagaagtaattaattattattttttatttatagttttttatgttatttttatttatgtttttgaagaatttgtttttatttttttttttattagtttggagttggtttggggaataaagaatgggatgaaatggtgagagtttagaggggttgagtaaagaatttattattatatagtaaggtattaatttgaaatgtttgggagaagtagaagttgtatttgatttttatatttttattggattaggaaggtatgtaatttttgagagatgttttttttgtttttttgtggtgattgtttagtttagtattgtttagtatgaatgatgaatgtaatttgagttatgaatgtgagttatttatatatttttaaattttttagtagttatatttaaaaagtagaaagaaattagtaaaattaattttaattatatattttatttaatttaatatttttaaaatgttattttaatatgtattataaaaattattgttattttttatagtttttttttatatttaattttgtgaaattaatgattttttatatatagtatgtttaaatttggattagttatattttaagtgtttgttagtatatgtggttagtagttattaaattggatagtgtagagttagttttttttttattgtttgataaaggtaggtgtttaggataaagagtgttttgaggttttattttttagttttagaaggtttattgtagggttaattatttaggagttaggtggggtaagggggggttttatttttttaaagtttggatggtagttttgtttttttttttatgaaagagggtttgagagggggaacgaagatagagtttttgtaaggggaggtcgagtgtttttattttttagtttatttttgttagaagagattttttttgtaggtagaggatgagtttagaagttggggataatggtttatttttggtttagattttttgtaggggtgttggattgagtggagaattatagggtggagtttttagatggggagttatttttggttttagtattttttttttagtgttttgtagttttaagatagtataagatagtttggggttaggtagtgggataagcgtgggtagtttttttgagagttattagtttagttatggggattgtttagcggagacgcgggggtttttttaggaggggtttgtaaatttagagtataggaaatattgtttgggagtattttatttataagggtttttagtagttttagggtttagttatatttttttttacgtacgtgttttagatttagttatttcgagtagggagaattaatttttataataagaattgtggagattggatttgtggtataagtagattttttattattttttgtattttttaggttttaatagggttaggtggttattgtgtttttttttttggggtaaaaataaaataaaaataagagaaaaaaaaaagaaggaaatagggttaggtgggagttgggggattgtgtgtgtgtgagtttgtgtatgtgaaagagggaaagaaaagggggatatagagtagagtatattagtttttttaattttaaatttgatgaagtggaaagggttgggtttttttattgaaattttaaattagaattaaattatttttgatttgaagagtttagaaaggtgttggatcgggttggacgtggtggtttacgtttgtaattttagtattttgggaggttgaggcgggtggattataagttagtagttcgagattagtttgattaatttggtgaaatttcgtttttattaaaaatataaaaaattagttgggtatggtggtgtgcgtttgtaatattagcgatttgggaagttgaggtaggagaatcgtttgaaattagaaggcggaggttgtagtgagtcgagattgcgttattgtattttattttgggtaataagagtaaaatttcgttaaaaataaataaataaataaataaataaataaagttgttagatcggttgagattatgtttagtggggtgggaggagttagataaagtagagtagttagtggataaaagaaaagtttagataataaaattaagaataaaataaaatatgtttttttgtttatgtttgtcgagtggagattttcggttgaatgggtggagattttggggtattgttttggtttttttttgtcgtagttttaaggggaagtgtttgtgtatggggggttgggggttggggtgggggaggtgggtgtggaattttaggtgataattttagaagattttatttagttgtttttatgtttattttagattaatatagtttttatattaaggggagtttttataaatattaatttttttttttagttgtaaatatagaaaggtttatgaaaaatatttggtcgaatatttaaaatttaagttatttattattgttttgttgatttttgtttttttgtaaggttggaagaggtttttttttagaatgttattgattttgaatttattttttttttttttgtaggtaggaggagatattagtgtgtattagagaaggagaagttagagatgatagtttttgtttgaggttatttttggtttattagataatttattattaattttttaatagttattgttttaggttaggtgtttatatggggaataggtttaggttttttatggttttcgtaggagttagggaggtagataaataatatattacgaagatagaatataagaaatgtttgggaggaggtatattgatgcgtggaaagtatttagttagaagtttggtattagaagggtttagggattgttggtatgtatgagttatagttttattttagtggagtgagtagggagagaattttttggaagtaggtgaatagagaaaatatagttttttttttatttttgaatttttttaggttttttgtgatggagttatgttttgattttgttttattgagttttttttttagttttagaggaataggggttgggttgagaaattgaaattttttatttttaggaagatgtggttgagttggttggtgagattaggggatgaggtgtgggagaaggaggatttgagatatggggttgagaaatgaggggatgaagatttgggggtagaattgagagcggtggtttatatttgtaattttagtattttgggaggttgaggcgggtggattatttgaggttaggagtttaagattagtttggttaatatggtaaaattcggtttttattaaaaatatgaaaattagttaggtttggtggtaagcgtttgtagttttagttatttgggaggttgaggtaggagaattatttgaatttgggagataaaggttgtagtgagttgagattgtattattgtattttagtttgagtaataagagtaaagttttattttaaaaaaaaaaaaaaaaagaagaagatttggcggttaagggatagtgagttgggagttagaaagttagggttagggatatggggtaggagtgaggtagggtatagggagatatggaaatgaagatgggagatggagatagagaggagggaaaaaaatagggttagggagatagagtaggggatttaggagttatttagttgagtaagggggtatttaggaaatagtagaatttgtgttgaagaaggaggaaggttgagaaaatagttggtttttttaataattaattacgtgttaatatggttggtataggtatttttcggttgtagtttaaatgtatgaatgtagagttagaggtgggtgggtatttttgagagaggaatgttgattgtatttggatatacgttgagaattgtatgtggatgaattagtaggtaaaatatatttggggtggtttattatatttgtataagacgattttgatattttagaagagaaagagaaatagtatagttttagtatttggttgatttttaggagttaaggaggagatatagagtttgttgggtgtggggtagagtaggaggagtaagaatttttttaagttttttttattttattttttttttttttttttattacgaagggtttttttaagaagtattgttttgttagtaagtagaaaagtgttttgattttaagaagaattgagtgaagaagagaagagtgagatttagaagatgaatttggttttgagattgaataagggagttttgttagttagggtaggagaaaggttagaatggttttgtatgattttttttaaaataaataaataggtttttgaatttgtgggagaatagatgatttgaggaggaattattttagtttgttttaagtattagttagatttgtattgtttaatatggtagttattaattatatgtggttattgaatattggaaattgtggttagtgtgataaagaattgaatttttaattttatttttattaatttaaatttaaattaaaaatagaggttaggtacggtggtttacgtttgtaattttagtattttgggaggttgaggtgggtagattatttgaggttaggagttcgagattattttggttaatatggtaaaatttcgtgtttgttaagaatataaaaattagttgggcgtggtggtggggatttgtaattttagttatttgggatttgggtttaggaggcggaagttgtagtgcgttaaaatcgcgttattgtattttagtttgggtaatagagtaagattttattttaaaaaataaaataaaataaatagaagaagggtaaagtattttttttattaaatataattttattgatttggtaagattatattttattttaataattgataatttagtatttgaattgagatgtgttaaagtgaaaaatatatatataattttaaagatttagtgtaaaaaaaaaaaaaaaaaaaaaattattaaaaatttagaatgtgaaatattttattaatatttttaaaatatttattataggttgaaaggataatattttagatatattgagttaaaatattttattaaaattaattttatttttattattttaatgtgattaattagaaaaatttgtaattttatatgtggttgaaattatatttttaaattatatatgtggttagaattatatttatgaattatatatgtggtttatatttttattttaatatatgcggtttatatattgttattggatagtattgggttagaggtaggatggttggggtaattttaggtattttgttagtggtttatgttttgatttgagattagggatgggttgttatttttttgtaattttgtttttaagggatttatttttagtagttgtttgggtggtatgttttgtttggtttttagggaattaatgagttttttgagatcgtttaattgtggtttagtggaggtaatatagtgtttttttgttttcgtttttttatgatttagttagtaaattcgtgatagtaggaaatttttttttttttttaggatttgatgtaggagtttaaattttgtgaggattttttgttttttatgttttatttggttttaagaaatagggataggtagagggtgagaggatggtttcgaaggtttttttagtttattttatttagttattaattttattaagtttgtgtggaatttttaattagagtaatgtgttagggtagatttggaagaaaggaaaggagaggagaataaatttttaaaagtatttattacgtgtttagttttaagcgaaattattaatttatggtttattatttgtttttaaggaattgtttaatataattttagaaggttttttagtttataattttttatatagattttattttttttacgtatataggaaaataggtaagtggggttataatgtttttattttttttttgttttttttttttttttttttttttttttttttgagatagttttttattttgttatttaggttggagtgtagtgtacgattacggtttattgtaattttatttttttaggtttaaataatatttttattttttagtttttttagtagttgggattataggcgtgtgttattacgttcggttagttttttttttttttttttttaattaagaggagagtttcgttatgttgtttaggttggttttaaatttttgggtttaagcgatttttagttttttagagtgttgtgattattggcgtgagttatcgcgttcggttaatgtttttattttttaattggggaattcgttgagggcgtagttcggttttaaaaatttgtatttgcgattttaagattagcgcgggtttttcgtgttttattttgtttgtcggtggagattgagtagttagttcgttgtaatagcgaggtcgacgcgggaggtgatgtcgtttggtcggttaggtgttgaggcgtagaggagaggatatggtttattggatttttttttgaggggttagtgtaataggggattttaggagttttggtagagatgtttttgtttttagagatcgtgggatggagttttttttatcgtgaagatatcgattttgtgtatattttgtgtttttatttgtattgtttttttttttttttgttgtaagatttggatttgtttttgaatttgtttttgcggaaagagggtcgtttggataggttgtgtttggagatttttggttttataaaatttttttggttttttaggagagttggtgatattttttaggtgagtttttgtgtaattattaaggattcgttttttttaagttggcggggaaaggggttgttgagaagggagaaatttggagtttaagtgatttaaatgattagaatatagttatttatgattaattaggattatggatggtgttttggaattattaaagaattataaatttttttttatttgttttattaataattttaagagagttgttttgtttttgttatttgaaaggtgaggtatttgaggtttagagaggtaaagtgattttttgtaggttgtatagtaaatttataagattgggtttgagtttaaattttttgagttaaatttttatattttttttattttttattgtattttgatttagagagttagtcgttttttagatttagttttttgaatttattgtgtttgattgcgagttgtttatttaagtttaaggggtgggggtaatggggtgtaaatttttagtgggaaggtagtagtttttagggttttattgaatttttgggttgatgggggaatagggaagaaattttaaatgtttatttgataattttgggtagttttttcgattaagttgatattatgggatttgtggtttttggatttacgatatataaaatagaggaattttttattattttcgtagaaataatggaatattttttggtgtttcgggtatgtagtttttttttttttggattgtattttagaggtttgtagagtttggattttttttattagatttcgtaatagcgagttgaatttgattgcgtttttttttacggaagttttgtagaggggatatttgaaaaatttatatgatgtttttttaatttgagtgatgtatttgaggtagaaattgtgtttatagttaatggtgataggtttttgtagaatgtttaggtagatggggtagattatttttttttgtagtttgtttataaattgtttattggttatgatagaataatagggttgttttaagattgtaggaagttgtgttaagtttgtaggagtttcggagtttattgtggatattgtttttaggaagggagaagggagttagagaaagtggaggttagagattttgttaattagttagaagagtagagagagaggaaaagaagagggagaaaaaaataaatgatagaaaagcgtaaaatttaggatttagaaaatattataaagagaggaaaatagatgggtagttttattttgttattttttgagaataaatggatattttgaatgtgtaataggttgtttataaagtgaaataagttgttttgaattttggattaaaggtatgtttgtatggtggttgattaaaattagaatgatcggggtattaaatattatttatgggggattttttaattagttttgagtagggagtggaggggtgggtggtgatgtttattgaaaggttatagttagtttattgtaatgttttgggtattttgtatgtaaagtttaagttttggtagagtatttggaaagtaggggaagggtaattttttattttaggtgttttggttttttatagaattttgtgaaaatgtagaggttattattatttattttggggaatttttagttatagggttaattaattattttttagtttagtaggataggtaaggaattttttttttaaagagttgttttttgtttttgtattttgtttttgtttttggtgattttttgtttttttataatatttgtagtagtttgttttttgttgattttttttttgtatgtttttagtatgttggtgttttcgtgtttattttttgttttgttaattttgtttatatgttttttttttttttttttggtgtttttttgatttttgatttgttttttatggtttttgttatgattaggaatatattaattagtgttatatatatttttttttgtatatttatgttttaattttttttttttgttttttgttttaaggaaaagggtgttttttttttatttttttttttggtatagtttttatttttatttttttattttttattattagtcgtttgtttttagtaagaagtatattattaatttttgtttgattttaattttaggttaaatagggtttgtggatgattattataataatagttagagtgattatatattttgttttgtttggaattattttgggttttattttgttttggtgtaattattaatagtatttttttttatttttagaaatgtttagtttggattataaattatgtggttttttttatagtaattgttgtaaattaaagatttttagaaatgttatatttttagatttttttttttgtttgttttagggttaaattaaaatagtttaatatttgtaaattgttttatttatatttttaaattgttggtttttagaagtagaatttaatttttgataggttttgtttgattggtatgatgatttagaaaataatgataatgtagatgtttttagagagggtggttatgttttttatcgttttgttattttacgtttttttggtttttgaaggtatttgatattatgattttgatttatagatttattttgtttatattattttatttaatttttatttgtaagaaattatttttatttttttttaaaaaaggaatttagtattttttagaattatttggaaaatttgttaaaatttagatttgttgaattttagtagagatttttttttttaataggtttttggtggagtttgatgattgatattttaagtaaattttttggagaagtcgatgtttttgatggaggtttatatattgataatttttggtttagagatattattaattgttttagtttatttagttaataaatgatagattttagatttaattttaggttttttattttatattaagttttttttatttttttttgttttagtattaatgaaaataaatagtaatttttaaaaatgataaataaatattttaaaagaatattggtattttaatgaagttgggtaatttagtagagagaatgaaaatatttatatgaatattattggagagttttaaataattgttattaaataggtattgatggttttatgaggaaggaaatttagatataaaaaatgagaatttatagtgttttaaaggtgttttatttttttagaattattattgttattttgggttatttatttattggattgaatggagatatatatatatatatattttttttttttttttttttttttttttttttttgagatagagttttattattattgtttagattggagtgtaatggcgtgatttcggtttattataatttttgaattttcggtttaagtgatttttttgttttagttttttaagtagttgggattataggtatttgttattatatttagttaattttttgtatttttaatagagacggggttttattatgttggttaggttggttttgaatttttgattttagatgatttatttgttttagttttttaaagtgttgggattataggcgtgagttattgtgtttagtttttgaatggatattttaaatttttagtaggtttagtagtttgaaattaaatgtttttaatttgtaagggttagggttttgagatagttggtattgtgttagttttaaaggatttttaagttaattttgaggtatagagtttataaaaattagttatagaataggaaatgatgtagagttttatgtatatgagatagttgttatatataagaaagtagatatagagttatgtagtagcgagtgtatagatttggaggggatttgttaagattaatgggatgagatattttattagaggttagtgaaggttagaggtagtttagttgttagattagacggttttataaagttatataagtttttttgtattacgattttagttatagaagttttttttgttttaggatttatattttcgggtttatgtgaattggtagaatgtttatggaggaaaataatgtgatatgttttaaaattataaatgtttattttttttattttagaaattttatttttgggaatttagtttatagatatatttatatatataaatttattttggattttgtggtaatgtttgtattagtaaaatattagaaaataatttaaatgtatattagtatggaaatgtttaaataaattatagtttagttttataatagaatagaaataaaaaagaattagggatttttttatttatatatggaaaatatggttaagatatgttgttatgtgaagaaaggaaaaaataaataatgtagaaaaatgtatgtattatgttattatttgggtagaaaaaaatatatttatttttttgaatatttaaataagttttttttggaaggataagaatttaataattaataatggttgtttttaaggagagggattgattagttagggaataggggtggaagagaggtttttttttgtatgatatattatattttgtgaatttttaattgtataaatatattaagttttttttttttttagtattttttatattatgttttataatattaaatagtaaattaaaaaatggatagagaatgaaatggatatttgtagagtaataaaattaattaattaataaatatttgaaaatagtaattttgaaaatgtacgtttaatttattggtttatttttgtaattttagtattttgtgaggttaaggtaggtagattttttgagtataggagtttaagagtagtttggataatatggtgaaattttgtttttataaaaaatataaaagttagttgggtatggtggtacgtatttatagttttagttttttggaaggttgatgtaggaggattgtatgaatttgcgaggtcgaggttgtagtgagtcgtgattatgttattgtattttagttattttattgtattttagtttgggtaatagagtaagacgtttttttaaaaaaaaaaaaagaaagaaagaaagaaagaaaaagaaaaaagaaaaaagaaaatgttaattaaaataaaagaagatattagtttatattttaagtttaagtttggaataataaatatagttaaggatatggagaaataggtatttttatattttattggtgagagtataaattataataatttaaaaatatttagtagaatttaaacggtgtatttttattttaaggttttgtaatgataatgatgatgatgaaaatattgttattagtaaataaaagttaatattttttgaatgtttattatgtgttaggtatagttttaagtattttgcgtattaatttatttatatagagaagtattattatttttattttgaggataagttaacggagattaagagagattaagtaatttgttttaaaggttatttagtaagtaaatagtggaatggggatttgaatttaggtagtttttagagtttttttatattttgtatgattttgtttttttagagaaaattttgtatatgtgtatttagagatgtatgtaatagtattaatattggttgggtgcggtggttttcgtttgtaattttagtattttgggaggttgaggcgggcggattacgaggttaggagattaagattattttggttaattcggtgaaattttgtttttattaaaaatataaaaaattagttaggtatggtggtcggcgtttgtagttttagttattcgggaggttgaggtaggagaatggcgggaatttgggaggcggagtttttagtgagtcgagatcgcgttattgttttttagtttgggcgatagggtgaggtttcgttttaaaaaaataaataaataaataaataaattttatgttagggttttttaatgatagtattgttgatattttaggttggataattttttggtgtgtggtggttttgtgtattgtaggatgtttattagtatttttggtttttattattagattttagtagtatttttattttttagttgtgataaataaaaatgtttttaagtatgattaaatgtttttgggggataaaatttttgatggaaaattagtgatttgtatgtagttatatggttaggttttaaaatagtaatgagtatgtggtgatttatatatatttagaaatatataatattttatatagtttgtagtttttatatatgtgatagaagtttaaatataaggtttgaaaggatatatattaaatttatggtagtgtttgttttcgggaggagagagagaaagagcgagagaggaatggaattaagaagagaattaaatggatagagggaattttaaatttttttgagattaaaatttaaaaaattaaatttgtaatatttaatttttaaaaatttgaggtaaatatagtaaaatgtttgtatttgttaattttaggttgtggttataaggtgtttgttatatgattttttattattttttatattaagtttttttaaagtaaaatattttagttaaaataggaaaaatgttgaaaatgaataatggatagaaataaaaatagaaatttagaggaattttaaaataaattttaaaattaagaaaaagtttaattttttttttattatttaggaaaatataaataatgcgatataaatataaaaatgagataaattttgtatttattagattggtaaaattttttaaaaatgtttagagttgatgaggatgtggaaaaatgggattttttatatgtggttggttttagtgtgaatgggtattattttttttaaaagttttaaggtaaatgatttaaaatgtatttgaacggtgattagaaagaatattataagaaaagtaaaatgtatataggattttaaaagggtttttaggttttaagataagttagggacggtggggtcgaaatgaagttaagggatagtttatatagagatattttataattagttttttaataagagagttagattttatttagttaaaaatagaaattagaaataggaggtagtaaaaatagggtttttttttttttttttttttttttttttttttttttttttttttttttttttttttttttttttttttttttttttttttttttttttttttttttttttttttttttttttttttttttttttttttttttttttttttttttttttcgagatagagttttgttttggttgtttaggttggggtgtaatggtgtaattttagtttattgtaattttcgttttttaggtttaagcgatttttttgttttagttttttaagtagttgggattatagggttgtgttattatgtttggttgatttttgtatttttagtagagatagggttttattatgttgattaggttggtgttgaatttttgatttttagtgattagttcgttttggttttttaaagtgttgggattataggtatgagttatagtatttagttataaaaaagttttgtttaaaatattagaatgattaaaatgtttgttttttgtttgtatgtatattattttattaaaaatgagtttaaagttttttatagagatatatatatgtaaatagaaagaaaaaaaaataggagggttattaaaataaatggagtaataaagtttagtttatatatagtagttaatataatattgggttgaattgtttaattaaaggattagttatgagattaaaaattttaataaaatgtaaagtttttttttttttttagagaaatttattaaaatatagaagtataaatttagagatagtttaagggttgttgtgtttgtgtagatgggagaattttatggtggttttatttttttttttttgttaggagaaattgtagttttttaatatcgcgattttaatttaggagtaagggtagggggaagaagttgaaaaggtttggtttttatttgatttagttatttagattatttaaattattggattggtcggtggaatggttaattttatatgttaatttggttaggtcgcgttatttagttatttgttatggttatgttgtttttataataaatgatattagagaaaagtggttgagagaaaagtggtaagaagaaataaaaatatgtttgggtttgaggatttaaatgtttttattagaatatattagattatgtaatatttttgtattatagaagtatcgtgtttagagtttaatatagagtttttggtaatttattttgggaagcgtattttaataaaggtaatcgtaaattggattgttttgagaggaggttatttggatggtaagtagttttgaaattttattttaggaggtatgaggaggatttggttggttttgagagatttaggagtatagagtgttgttttttagatgcggggaggtttgtggtggatgtttgttttttttatggttttaatatttttatgtagattttcgcgggttgaattgtgttttttttatttattgttttaaatttgtatgatgaagttttaattttaagaattttaaaatgtgattatatttggaaatagggtttttgaaagttgattaaattgtcgataaagagttaaattttataaaatatttaaagagatgtattttgagttaaatatgggtggttatggtttatgatatagtttttaggagattttgagaatatgtgtttgaggtggttagggtatagtttggttttatatatatatttttgggagatatgatattttaattaagtatatttaagatgtatatgggttaggtttagaaaggtaggatgatttaaagtagggagtttttaggttataagtagatttaaatattttttggttgatagttggttgagtttatttgaagatttgggattaatggaaaggaaatgtttgggttgagataaagaattgtggagagaaaagagaaaagttttttttttttttttttttttttgagataaggttttattttgttatttagattgtagtgtaatggtatgatttcgatttattgtaattttcgttttttaggttttagttatttttttgttttagttttttaagtagttggtattaaggtatgtattatttcgtttggttaattttttgtatttttagtagagatgggatttttttatgttggttaggttggttttaaattttcgattttaggtgatttgtttgtttcggttttttaaagtgttgggattataggcgtgagttatcgtattcggtataaagtttttaatgtgtagaggaagtttttaggtagtaggttttagagagaatagattataaatgttttttattagatttaaaaagggtgttagatttttgattattttttggatttgaaaaaaagggaaaaggggattttttatagaatgtagattttttttttataagagataattttgtagggtaattttaagatatggtaaggaaatatatttggggttaaaatattttgatttttttttttatttgttatgtaatgttatgttagagttagtttggaaagtaggttatattagggttaaataaaatttttttgatgagattttacggtttgtagggtatgattttttaggttttttaggtagaaatttgggtaagagaaggaaaaaggttagagtttagtttttagaggtaaaataagtttattagagcggatttttgtttaatttgattggcgtttttataagaagacgagatttggatatatagaagggtattagggatgttttatatgaggaaagattttgtgaggatttattgagtagacggttatttgtaagttaaggagagcggttttataggtaataattttgattttggatttttagtttttagaattttgagaaaataaattgttgttgttagagttatttagtttgtggtattttgttacggaggttttggtaaaagaatatatagatgaatttttatattatcgtagagtttattttttatttttataattttagttttgagtttttagtttttcgtaagggattttttaatttttatattttttattggatggagtagtgtttatttttttttttttttattgtaaattttagtgtaggtattttataattttgtagttgtaatgtgagttagtttagtttttttggattgtgtgtgggtaatatatattaaaattattttaaaatgtatttaagatcgtttggtttagtagttttatgtttaaaagttttttttaagtgaagttatttttatagggttaataataattttggatagaaatataattataattaagttttaattagattgtattttgatttatttttttgaaattaaaagttatgtaatattagatattgattagttatatttttattgttgttttaggtaggatttttgatataagaattagttaaggtaggaggattgtttgaagttaggagttcgagattagtttgggtaataaagtaagattttatttttataaaaaaaattattaattaaaaaaatttttttaaagaattgtttaagtagattttgaattttagtagaatagttgatgataattagtttaagatttttataaaggaattgtttttttaatttgataatatagtttttttatttttttgttttatgattttattttgtattttttagttagttattttggttaattttaaaatttttaaaatttttagttttaaattatttggggagatggatttgaagtttttttttatgtttttatttggcggttttacgattaaatttttttttttgttgtaattaggttttagtttattgattttttgtgtttgttgggtaataaatttgttatggttatataaggaagtaattaaaagtatatatagttagagaaaagaaattagaaggataatttatttgtttattataatggatatttattattatgtgataggtataattttaggtatttttattatagtgaataaagtatatagaagttttatttattgagagttaggtagtaaattagttaattaaatgaattatatattaggaggaaatttttttttttatattaaggttttaaggaggaaataaatattatggaggaaaaaataaagtagaaagggagtatgaagagtagtcgatatggttttagtttttaatagagttgttaaaataggtttgagaaggtgaaaattggtattaatttgtaggtagttaatagtaaggtgttaatagttgttattgttggttggtgaaattatgggtaattatatttttttatatttttttgtgttttttaaatgtagtataattaatatatttgtttttataattaaaaaaattttataataaatgttatttaaaaaaaaaaattgatatttttagttgttttttattttttatagaataaagtttaattcgttttttattggtttttttttttttatttaaatttattttttattttttaattgttttttttagttggtttgatattttgtgatttagatttgttaaatagggttgttagatttagtaaataaaagtataggatatttagttaaatatgaacgttagataaataatgaataatgtaatatttgagatatattaaaaaattatttgttgtatatttgaaatttaagtttaattgagtatcgtatgttttttttgataatgtgataagtgatttttttttttttgtgttggaataattttttttttatttttttaaatttttttagttaattagagggtggggaggagggatggatgtgggtgggaatgagagataagtttgtttattaatttttgtatttaatataggatatttttgggggttaggtgtggtggtttatgtttgtaattttagtattttgggaggttaaggcgggtggattatttgaggttagggggtttaagattagtttggttaatatggtgaaattttgtttttattaaaatataaaaattagttggatgtggtggcgtatgtttgtagttttagttattcgggaagttgaggtaggagaattatttgaatttgggaggtagaggttgtagtgagtcgagattgtattattgtattttagtttggtgatagagtgagattttttattaaaaaaaaaaaaaaagaaaaaaaaagatatttttggggagtagatgggtggtggagggcgggggaataagggtggggtattgttaaaatatcgtaaaagggttttttttttgattttgaattatgatttttttatagataaaaattgtatttttaattagagaataatggtttaggtgttaggtataggtgaaagtttaaagttttttttagaaaagaaattttattttagttatatagaatatttatttaaattttttattatttaatttatgtaaaatattttagttaatgtttttaattcgagtgtttttaaatattgttttttaaaaaataaaaaatttttaaaatattgaattatttacgggggttttaaaaatagatagtttttgttttaaatgaggatgttttttttttcgtttgtttgatttattttttgtttttatggttttttattttatttattagttttatagagatttgatagaattttaaagttgatttttgagttagattgggtttgttttaaggttagtttatatttgaaattaagtttttgttgagtttgtggagtaaaaggttgatattttttttttttttgtaagatagttgtgtgttttggtttagagtgggtatagaattgttgggtttaggttgttagaaatttttgggttggtatttagttgttttaatgtataaagttagttaacgtaggttaattatgttagtgagtttatattatagaaggacgggaagtagtgggatgcggtatttaggggtagtagtttaattttttttaaagttaaattttagaaaaattttttaaatttaaaaaatggaaaagggaaaaatggaaaatggaaaaaattttaaatttaattttttaaatttaaaaaatggtaaaagtttttatttatggttatagttttttattttgatatttttagtatttattatggtatttggtataaaatagttaattttttagttgttatattgaatagttattttatataggttttttatattttaatgataataatttttaggtaatattgttaagtgatagaatagtgtttagtatgtaaaattttgtttaataaaggggagaaatattaatatatatagttgtatttaatttttatttatataaagaaatattgaaaggatacgtagaaaattaataaaagtgtgtatcggtgggttagggacgggggtagtggtaggtggaatgaatgaagaagggtaaggtggttatagttttatttaatttatattttttaatatattattttttgagttaagtgtatgtataattttttaagttatatagttaaaattatttatttttggttatataattttgtagtagtaaaaaatttaattgaaaaataggaagttattttttttatttttttttgtggttatatagtcgtttatgtttaattttttttaagtttatagattgattaatatagttattatatttgagtttttatgattttataattttagtgtttattattgttttaatttagatttttttttttttaaaaaaaatttgttacgttatttgttataatttttagttttttgttaaatgttttatatatagtttttatttttttgaagatagtatatatattgttatatagtttatgtttaataattttagagtttggaagttttatgggtttgattttgttgtttgtttttatttttgtttttttttttttttttttttttttgagataaggtttggttttacggtttaggttggagtatagtggtatgattttagttttttgtaatttttgttttttaagcgtaagtcgtttatttattttagttattttagtagttgggattataggtgtgtattattatatttaattgatttttgtattttttgtagaaacggagttttattatgttgtgtaggttggttttgaatttttgagtttaagtaattttttagttttagttttttaaagtgttggtatggtaagtatgagttattgtatttggtttgtttttgttttttttatggtaatttcgtttttttggggtttgattatttttgtttgtttgttagatgtatttgaggtttaggatgttattattttttttttagaatgattgtttttgatattagtagtttagagttattttgaataagtttaatggttatttgagattttttgggttgggatattatttttattttttttaagtttttaaaggttgttaaaaatgtagtttggatttttaaattttttttagtaaatgtttttagaatagaagcgattttagttgtaggtttatttttatgtttttttttttttttaaattttggtttagtaattttttattaatttttgaatatttaagtaagatatttaaaaatattttatcgagtatttttagttgtttttaaatggaggtttggtttgaattatttagtttattaatggaagtagaagtttttttgatgtaggttttagttttttagtagtttgtttttttttgggttttagtttttagaaagatttttttgtttgtagtagtaaagtttgtataaagtttgtatggattttttttgcgtatatatattgttatattatttttagttaaggttggaagagaattttgtattttatatatttaatattttagaagagttggagttatagtagttttttttattgagtttagaaataaaattttgtttgtgtatatatttaggttgggatttttaaaatgtagatatttaagtgttttagttttgagaattttagttttagtgtgataacggtataaggagttgttttacggtgtaaaggtttttgtgaggttttagtttgtagattaggatgtgataaggagattggagttgtagttagttttagaggtcgaaagaggagttaaatagtaaatagaggtgttaaatgttgttttagaaatttgtaagttagttaagagttttgtagttttaattaaataaaatttttttattttattggtttggggtgtattgtttttagggtttttgttaattgaattggtttgtggtgttttgaaagattgggggtttgtacggaaaaggttcggaggttagttttttgaggttgtttttgttgtaggaaataaaatgaatttttttagagttatagtattagtatttggagattatttttaggggttttggggcgtacgattttcggggttttggttttttgtttttttattcgtagaatggagacggttattttgtgagaagttcgaggtgcgtaggatttaagtgaggagtcggtaatttgaagtttttaggatggggagggattcgaaggaggcggtgtgaagatttaagaggatcgttttggggtgggaagaggatagttcggtattggttgttggtttaggtgttgtgatgggtttcgtgcgtagagaggtttgatagtttttgtattagtgatcgggcgaagagtggggtagttcggacggtggttggggaacgttagggagattggcgcgcggattattgggtgagcgtttaggaacgtcggacgcgcgtttttacgttcgggtgtttggcggcgttttagaaaagttgtatttgaaaagtaatcgattggggtgaaggcgggggagcggaattttgattatattgttttaattttagttgaggtgggtttttaaaagaaattttaatttatatattcgattaggttagttataagaaaggttgggaggaggtggggttggaaatattagagggtttagatgttcgttggcgacggttttttgtaaacgatagagcgtaagttttgtttttggaattttagagtcgtcgtaaagataggaatttaaaacgattcgagtttcggagtcgtagtttttcgggacggttacgagtagagtttttaaggggatcgttggggattgggcgggggttttgttttttatttgttttttttttatttattgagttttgatacgtaggattagcgttattaatagatttgtttttcggtttagttttttttagggtttttgttggaaatcgattttatttggggagtttgtttgggttatttttattgtcggagaatttttttggggcggggagatggtttaggtttgtggggtttgaaagtttatatagtgttgtgtttttttaagaaaaaggatatagtcgggtacggtggtttacgtttgtaatttcggtattttgggtggtcgaggtgggtggattacgaggttaggagatcgagattattttggttaatatggtgaaatttcgtttttattaaaaatataaaaaattagttgggtatagtggtatgtgtttgtaattttagttattcgggcggttgagttaggagaattttttgaattagggaggcggaggttgtagtgaggtagtgagttaagatcgttgttattatatttaggtttggcgatagagtaatatttcgttttaaaataaaaaaattaaaaaaaaaaggaaagaaagaaaagaaaaaggatatagaatttgataaaattaagaataaaagtaaatatgatttataatgaggaaaaataatgatagtaaatgataaatgtttaaaaattgatatattataaatattaaaaaatttttttaaaattttaataattgtttgaattatttttatatttttttatttatattttttgattttttttttattcgataatatttttgtaatgtatttttttgggtgagaatgaataatttggtatttcgtttagtatagttaagtaaaaaaagtttttattgaaagtttagaaaagttaatatttattttataatcgttattggtaataatatgtaaatttttagtgttattaattttggagaagtttttgtgaagagttttttatgtaagtttgagattttagggtattttaagtttttttgggtagtgattaattttaaatatttttttaagttgttgaaagttattggtttgtttttcgttaagtttttgttgtaaaggtgtagtatgaaattgtttgtagatgttaatattttatgttaaaataataagttttttaagttttaatgtgtttatgtggttaattttttattaagtgattgttaaataatttaggtatttattttatttaaaatgtattttttttttttaataaattgttggttttggttggaattaaattttttttttttttttaattttttttttgatgttagaataatttttattaattttatgtgtaaatatgtaagagattattttattttatgatgtatgtataattgtatatgtatatttaataagtatatttttaaagaagagagtttttattttgattagattttgatgagattgagtaatacgtttataattttttatatttaggggttaaaaggatttattggttttattgtttatagatttttggtgttttatgttatagtatatatttttattgtgatagatttttgattttttattttagtttttgatgttaggtgagttattttagtgggtggtggtttttgtaagttatttttatattgagacgggtagtaataatttgattatatatgaaagtgtttatgaattatatattttagtaattttaaataatgtaattttaatttaatttttttttagttagaatttttatatgttatttgatataagagaaattgtgatagagggaagttgacgtggaaggagatagtaattttaatcgtggttaaaatatgttatttttgtaaattttataaaatatttagtatgattatattgaatatattgtttggaattttagggttttggaaagaattagtgtaagggatgaatttaatggtagagttttttttgtatattttacgattgtaataggtttgtttttgaagttttttcgttggggttttattttaggttgacgtattgtttgtgttatcgaatattattttttgtatttgtttattttttttgatttttttttgtgttttagtttggagttggaagtttataaatttttttattatagggaagtggttgattgtgtaattttatttttttgttgaaataggtgtgtttagttaagtatttattgtaaattagttttttatacgtattttattgggggtggatttattgttttttataatttcgttatatgtaatgtttatattggtttatttggttgtgttttttaagattagttgttttgtaggatttgaaataaggattttttaataatttggtgaatgtttaatagttttaatatattttaggttgttttagttttgtttatttggttttcgtgttttgtggtgagaatatttaaaatttatttttttagtaatttttaagaatatagtgtattattattaataaattattagaaggtataatagattttttgaagtatttttttttgaagtaattgaaattttgtattttttgattaatttatttttatgtttattacgtttagattttggtaattattattgtattaatattgtttgtttttattagttaatttttttatattttaagtgaggttatgttgtattggaggttgttttttttacgcgattgggtggaatttagaggtttttattaataatttattttttttattagtagtttttaagggttttgttgagttttttatgttttttgaatttgagattttgaatttttgtttttttttaattttgtttttttgagaattgttttattaaatatagagtatagtaatttttttgagatttttttaaatttttttttatttaggttattgtgtatgatagattgattgtttgatttttggaagtttagggataaaaagtattgagtgttggtttaaaggataggttttagtagaggatataattttagagtagataatttaagttttagtattaggtattttcgtttttaaatatttttttattatttttgtttaagatattttttattggtaaattttttttgttggttatttgttttttgtagttttgtaggttttgttttttttttgggttattttttttttttttatatagttttatgtttttttttttttttttttttttttatttttagtttatatattttacggttagttttttatagttagatgttttttgttttgaggaattatgttattagtttttaagttatcgtttaaaagacggttgttagtgttttagagttttggtaataatgttttatttttcggaggtgaagcgaaatggtgttttgttttgaaagatagcgttatttattgtttattaagagatagttgtcgaaaatagttgaatgattttgtttattgtttgttttggggagggtggtagataatttaggtaagaataattcgaaggtatattgaatttgaggtggtgatggaatatttaagaatgtatagaagtttaaatttaatagggatagtaatattaagttggtatcgggttttagggaggttataggatttgtatagtgttaataattgtgtatcggtagaatgggaatttgaattcggatatttcgtttgtgaagtttacgtagttttatttcgttgtattaagatagagtagatttttttttatggatgattaaataagtgagagggaatttaggagttagtggagaggagaattttaaggaggggattgttgatgatttaaagtttgagttattagtttggatgtgaattgagaaaatatcgttgggatttgagtttaggatttagttggagatttttagagagtggtttagggtgtttagttttgggataggtataggagagtatggaaagatagaaagatatagttttattttttatgaagttaaatgtgagttaaagttagggaagttggtaaaaattaaatggtaataaatgagacggtgatttaggaaagagagatttatgtagaatttgtaggtttttttgatatttttgtgaaaattaggatggattagtttatttttttggggttattgttgttttgagttagagtttatagtttggtaagtaatttttgggttaggttttagtttttatttattagaatgaagattgatttgttaggaaagttttatttaggaaattgggatttgagttgggtttttattgatgtgaagggtttggagtagttgtgtgaaagaggtaggagttaggttttttttgttgggaaatgttaaaatagaggtaattaagagttataaaggagagagagaagataaaaattatttgatttttggttttagtatttttaaagtatgagaaattagataagattatttttttaaaatagttattgagtatttaatatatttaaggagttatgtcgaataggttgatttagggaaataaggattttgatagttgcgtattagtttgtagtttatgaagtatatttatttttagttatgatattttgtttatttttttgtaaaggaggttgaagttgtggttgtttttgaatatgaagttataaatttttataattaggattataatttagattttttgattagtttagaattttttttattttgattattttttttttaaatattttaaaatttaggtaattgtttagatagatggtatatttgttggtttaaaattttaaaaatataggaaaaagttttttttttgtttttggtttttatatatttagtttttttttttagaagtaaattttattagtttattgatatatttttttagagatgttttttgtataaaaagtaaataagaatatttattttttttcgatttgtgtaaataatagtatattatatatattgttttgtattttgtttttaaatttaatttatttttattttttaaaattagtaatttatgtgtttaaagtataaattaggtatgggtatagattagaagttaagttgggataaatagggggttgttttgtttttgtttgatgtgagatgggtattattaagtttttttttttttttttcgagatagagtttggttttgttatttaggttggagtatagtggcgtaatttcggtttattgtaagttttatttttcgggtttacgttatttttttattttagtttttcgagtagttgggattataggtattcgttattatgttcggttaatgagatagggttttattatgttagttaggatggtttcgattttttgatttcgtgatttatttgtttcggttttttaaagtgttgggattataggcgtgagttattatgtttggttaagtttttttttttttaatgtattaatttatgttggagattattttaatagtaaaagtttttttttatattttattttttattaatggttgtataatgttttattgtatgaatgtagttagtttatttagtttaattttcgttgatgaatatttgttttttttttaaaatttgaagtaaatgtttttaaaatattgatgtaataggtatatgtatatattattttatatatgtatgaatatatatgtaaaatttttaatattagaattgttggtttaaagagaatgtatatttgtaattttggaggaaatttttaaatttttatttttttaaaggaggagtattaattggtatttttattagtagtgtatgggagtgttaatttttttatatatttattaatattgtgttattaaatgtttggatttttgttaatttgataggaaaaatagtatgttagtgttattttaatttgtattttttttatgagattgagattattttttaatatgttttagagatatttggtatttttttttttatgaaatgtttgttgagatatttttgtttaattttttttttggtagttgataaatttttatttgtaagagttgtatataaaaggtaattagttttttgattttgatggtagttgtaaatatttttttttttttaatggtattttattatttgttttttgatattgtatttacggtttttttttttttatgtaggttttttttaatgtggttgaatttatttttttttttttttatggtttttatatttgaaatatttttaagttattgttagttaaatatagtggatttttgtttttaagttgtttaataaattagtaggaaaattaagaaaagtatttaagtaattagtagaagttattatatagttagtattataagttggtataaagtgttgtttttttatttgtttatttatatatttaattattaatttatttttttatttgtttattaatttatttatttattaagtttttattgaattttttttaagagtaagaaaaggtatatatagagagatgatattttatggtaatgaagtttatgggttgggataagagatatttagatttgaattttagttttatgtttatattattgtggttttgggtaggttatttaatttgtttatatttttgttttttatattattttatgagatacgataggaacgtagattgtggaggggttaaggattgaaggttaaaaaatagatattgtcggaaatgttttaggaagagaattataagtgagtataatgtttatatttataattttaggtggtgaaatttgaattttgataaggttaagagagtggttattagggtgggtggtaaaagtaaaggttattggatgtgagtaggataagaattgaaaggttttggtgttaaatgattatgtatatagtttttgaaattattaggattatggtaattttatagttagatgaagggtaagttttgggaggattttgagtataggagtttttgttttcggtggagtgtgggatgtgttatttttttagtatgtggatgtatttattaatttggaatttttttaaatttttttgtttaggattttatagaggttttattatttaggtatgattgattaaattattggttgttggtgattaatttagtttttgggttttttttttttttttagaggttagaggtgagattgaaagttttaattagttaggcgtggtggtttacgtttgtaattttagtattttgggaggttaaggtaggtaggtaatttgaggttaggagttcgagattagtttggttaatatggtgaaatttcgtttttattaaaaatataaaatattagttgggtatggtggtgtgtatttgtaattttagttattcgggaggttgaggtaggagattcgttggaatttgggaggtagaggttgtagtgagttgagatagtgtcgttgtattttagtttgggtaataagagtgaaattttgttttaaaaaaaaaaaaaaaaaaaagaaagaaagaaagaaagattttattttttaattatatggtttttttgttaattagtttttattttttttttaagagttattttattagtataaattttggtatggttgaaaagggtttattatgaataataaaagatatatttattagaatataattatgtggtaagttgaggtgtattaggaattaagatgatttaatttaaaatttttgattttatgatgggtttattggggtattgagtatatttttattttataatatttttgattttagtgaatttattgggacgtaattttattataagttaaggattatttgtttaagggttttaggagttttgtgttaaaattaattatatatatattttataagattatataatttatagtaaatagtggtaaagtgggattgagggaggaggttttgaaatgaggtttttaataagcgttttggatttttagaagttttaagtgatagtttttattagtggtattttttaggggtttttttaaatttaatgttaagattagtttgattggagggaatttagataatggagtgggtatttgatgttttagtattttgagtgggtgttattattttgtgatatttggattttggggttttataagttggggttttaggatgtttatttttagttgagttttattttttgttatatcgacgttaaaggtttaagattttttttttttttttgagtaaataagttacgttttgtattaaagtttattttattttttagttattttaggtaatttttttggtaatttagtgtttttaggaaagtatgagtttttttatttttcgttttgagatttattgatatatgaatatatatgattggtatgatataagaattatttatttgttggttatttttttaggtttggagttagagaagatgatttgaaattgtagtaggagaaattgaggtaggatattaagaaagttttttaggagtggggttaggtaagaggtgtagtatgagggaataagagtgaatttttagtatttaagggaggtggtaggtggcgggggatttttttttttgggttatttttggtggtgatttgataggaaggaataaagtggttttaaatattatataagtttttagtttgttttgtgttttgtttttttttttatttttttagtgtggaatttatatgattttgggagggatgttggttggaagaatgattagttgatggagatgttgttgtaattattggtggtaataatgggtagtagtgagttattcggtgtgatagtgtaggagaaaatagtttaaatttttgttaaattttttttattgatggtaaattagaggagatttaaattgtaagtttatagtggtttggtttttggttatgataatgatattttgtttttttaatttggggttcgtgtaaatatttattgaaagttgttaagaggaaaatagaattggttattgaattatttgttttttttaggtgtatgaaaaataattttaagtttaataaatataaggaaatcgtagggtttatgttaaagttgatgagttatttttgaaattcgtgtagaattgtggtttgtgtggtttatgttacggtatttttgagggagagtgggtaattgtttgaatttggaggttgtgttttgtttttaggttgttttagggttgttttttttcgattgggtttttttatttgggattgttgagggtaataggtttttcgaagattagtgaagaaggaggttttgtaaataggaggttgatagggtaggaacgaggttatgatttttttgtagaaggataattaggaggagggtgtttgttttatttgttaggagagtttgaaggaggtcgtgagtattaattgcggatattttttttgtcgagtgtgtttgatatagtatgtggagaaggttttagtttttggggttttttgttgttttttttgtcggaagttttgttttgaggaggtgttagggataggttatatttgttttaattattagaagagggtgtgtaggttttgtgaggagagtagattttttttatgtgtggaatgtttggtgttttttgaatatatgttttattatgaattgattattgaaaatgtttttagttattataaggtaagtttgggttatcgtagttaggttttgtttttatttcgttgaggtgttgtattttatatgtttattatgtttggtattttagagtagtttaataatggatatttttttttgttttttttgttttattttgttttggatttttgttttgtttttttgtgtatattttgaggttgatgtttttatgtattaatgtgagtttgtttaaaagaggatattgttagtgtgatgttagagttttagtttgtttatttgtagaatagagtaattggattaattaatgtaaaatttttttaggattaaaattgtgtgaatttttggttgatagtattagaaatttggttagaaatgtaattaggttttatatatattagtaattattttgtaaatatattaaaatttgaaagttattatataatttttttttttttttttttttttttgtatttgttttattttttttttttttttttttgttatggtaattattttattttattttgttaaattttttattataaaagttatatgttgtaggtaataaatttagaaagtattgaaaggtataaagttaagattaaaaatttgtttttttttttttttttatttatagtttttagaggtaattattgtttgatttttgtatatttttttaaaaaatgtgtgtgtttatgaatgtatttttatatatatatatatatatatatatatatttttaaaggattttttttatatttttttttgtaatttatttttgttatttaaaagtgtggtttgaatatttttttattagtatgtatagattttttgaattatttttaagaattgtgtggtattaaattttatgaatgtattataaattggtagatattgggttatttttaagttattgttttgttttaagattatatagaacgttttaatgaatattttttaatatatatattggaggatttagaatatttaagatatattttggtgagagtataaggtagaaatttaattttagtttttttaagttataattaatttgttttattattatttgttgaatgatttatatagtttttttattgatttgaatgttaatgttataatatattatatatgtatatttttttgtatattgttttgattttttgtgttgttttattttgtttatgtttgtttataagttaaggtattttagagattttatttttattatatattttaatgttaggtattttgatagaatttttataatatttttattttttagaattcgtgtagatatttgtatatttttattttgttaattagttttggaattatttttattaattttttttttgattttaatttagttagtatttgattggataattgataatatttttatatggtatttttttatttaatagtgaaggttgaatttttaaagttgaggtagttttgagatatttgatttttggagaatatgttatgatatagaatgagaaagtggggagtttagattaaaagtgattatagaaaggtagagaaataattgaaaaagttagaggtaaagttttatttggttttaatattattttttttaggtgtaatgtttataggagagtggggagggattttttatttgtcgatgaagtagtataagatggagaaatttatttttttattaaatgatttttttaggtttgttttttgtgttagatgttatgttaggtattgtagaaagtataaagatgatttataatttttgttttaaatttgtttttaaataatgataagaaagttaaaataaataaataacgatgatatttgtttattaagtaaaaatttagtaagtttttgttgtgtgtgagaaattgtagtatgtgttaggaattaatgaagatagatgttattttttttgttaggagtttgtagtgtagtaagggagatataaataagtaattaaagaattgtaattttttttttttttttttttttttttttttgagatggagttttattttgttatttaagttggagagtagtggtatgatttcggtttattgtaattttcgttttttaggtttaagtaattttttgttttagtttttcgagtagttgggattataggtatttattattaggtttagttaatttttgtatttttagtagaaatagggttttattattttggttaggttggttttgaatttttgattttatgatttatttgcgttggttttttaaaagaattgtaattttttattagttaggaagaaaataaataagggtttgggatgaatagtaatgggtggtttatgtttatttggttagtgagggttttatagaggaagtgattttgaagttgagggttggtagaagagaaattaatttgtaaagatagggggtagggagtgtatatagatgtttatatttgagaagttttgttatatttgaagaatttattattagagtttgaatcgataggatttattgagagattagaagtgggttttttgtaagaaaaaaataattttattaaaaagtgggtaaaggatatgaatagacgttttttaaaagaagatatttatgtaattaatagatatatgaaaaaatgtttattattattggtttttagagaaatgtaaattaaaattataatgagatattatttttgttagttagaatggtaattattaaaaagttagtaaataatagattttggagacgaagtggagaaataggaacgtttttatattgttggtgggagtgtaaattagtttaattattgtggaagatagtgtggtgattttttaaggatttaaaattagaaatattatttgatttagtaattttattattgggtatatatttaaaggattataaattattttattataaagatatatgtatacgtatgtttattgtggtatggtttataatagtaaagatttggaattaatttaaatgtttattaacgatagattggataaagaaaatatggtatatatatattatggaatattatgtagttataaaaatagatgagtttacgttttttatagggacgtggatgaagatggaaattattatttttagtaaattaatataagattagaaaattaaatattatatgtttttattcgtaagtgagagttgaataatgagaatacgtggatatagggaggggaatattatatattagggtttgtgaggggatggggggtaggggagggatagtattaggagaaatatttaacgtggatgacggtttgatgggtgtagtaaattattatggtacgtgtatatttatgtaataaatttgtatgttttgtttatgtgttttagaatttaaagtatatatattttaaaaagtgggttgaaggaaggaggaaggttaaagatgattttatgagtttttggtttgagaaattgaatagatgatgtgaaagataataatttggtagaataggtttgaatgtaatattaagagttttatttaagataagttgagtttaagttgagatatattaaaataggattttatatacgtagttggattataaatttagatttttagagttttatttttagaatttagaataaagatttatttaggtaaagataatatttaaatttaagaaaagcgggtacggtggtttatatttgtagttttagtattttgggaggttaaagtgggaggatcgtttgagtttaggagtttaagattagtttaggtaatatagtgagatattatttttagaataataatagtaataataaagtgaaattaataggatttaaaaaaaagaacgtgataatttggggttgggtgtagtggtttacgtttgtggttttagttatttggaaggttgaggtgggaggattgtttgagtttaagagagtgaggttggagtgagttgtgattgtgttattgtattgtagttaggaagatagagtaagattttgttttaaataaagaaataaataattaagaaattaaggaaattgatgtaattgttttaaaagaggttagatagaaaaagaagttttggggtaaggttttgggaaaggtcgttatttagatgtaggtagaggaggatttagtaaaggagataggatgagttgttagaaaggtaggagaaaaataaggggaatggtgttttagttgttaagagagaagggtattttaagagattataatagattgtattgaataatgttaatattttagtaagatggtggtagaggtatgagagttgagttgggaggaggtatattttttttatagtaataatagggaataagagaaggtgtttgtaagtttatatagttttgtagttttggaaatttaggttttgttttggtttttatttttttataatatttgaggaaggaatattagtagtatgggtgggattaggatggatgtgaaaggtttgaaaagaaataagatggtgtgatgtagtgtgggagagcgtttataagagaaattatgtagggttggtagatagtatgtagtattaatttgaggtttgaaatgtttaatatgttttaggaggttgtttgaggatagatagtaaataagaaggtgatggtatattttattatggataaggagttgtttgaaaagtaatatagagagggagggtaagggagttgagtatatttttgaagaagtgattataatggtggattttatgtgtatttatggatattgatagcgtaattttgaaattaaggagggtttttttttattgatttttttattatatttttatttatttgaattaaattttgtagttaagtattgtaaattttgtttttttaaaagaattatataatttttgattgtattttaaaaagatcgaaaaatttataaaatttataaatttttatttgtatatttgtttttttattgattagttaatgttagtgttaattattttaatgtattttgttggtttagtaagtgtgtgatagtgatgtacgttgttttattttgtttgattatgaatgttagtagtggtgaggtttttatttatgaagattcgttgtttgtatttttttttagaattagggtataaattttatatgattgtattaaaatagtttattttttggataatgagttttattagttgtgtttgtttaatttatatttttttattttgttatttttttttaattatatttttgggtaattttttagaaatttgtatttaaattggttttatttttttttataatataatttttatgttttaaatatatagaaatttgtttaatatgagtgtgttgttttgttttatttttaaaggtttattaatttttggtttatttggaattttatatagtatgttgtgtgaaggatgattttacgttaatttttttttattttggtatttagttgtttttaaaatatttatataatagtgagttttttttatatttacgtgttgtttttcgtttgatattaattaagtttttatgatgggttgttttttttttattttagtttattgattattttttttgttatatagttttgataatatgttattttatggtttatttttaaatttagtagtatttttgttatttaataattttattatttgatatttttgttgttttttaagatgagtgtttttttataatgtttttaaattttatagattattttataagattttaatggttattgtattaaatttgttgattattaagaattatgatttttgggggtttagttagtttttttaattagtattaagatatattattaacggttttttattatgtatttgaattagatattaaattgtttttatttaaattttatgtgttttgattttattgagggtagttatgtattttataatattattttttttgataatttttatttgtagatttaaatgagattttttgttgagtttatgtatttattatatatttttaaaaattttttgatattttttagattataattgtgtgagtgatgttgtttttaatttatatttttggatatagttttgtaaggagtatgtattttgaaagttgttaattttttttttttttttttttttttagtgttagggataggtattttttgtttgttaattattttttttttgtatattgtgttagtaagttgtttaagaataaatttaatgtttttttttgttagattttaaaaatttaatatgatttaatttgaatgatagaattttaaaatatttatttagataagataggttttcgattattttttagattttaatttgtttttttttttttgaggaatattttggtaggtgaaagtgtatagaatttagttttttaattttaatgagtgttttatttatattatatgtatttattaaatatttttatgtaaaaattggtgaaaaagtattttttagaaatagaggattttattttatttattttgaatattgtaaataatatgatagtattatttttagttattttatgtttttatttttattattgttatttttgtttttttttttttatttatatagtgtttgtagttggttttattaaattttaaattgttagatgataggattgtggttttttgaattggattttaataggtttgattttgataggtagaaaaataaagtatttttgatagagagaagtaaaaggttatgaggaggtgtggttgtacgggtgtgtttgggaagtagagagtaatgttgtgtgttggtgaagagagtttagtgagtagagagagaatttcggataatgttagttggggttgggttttggggtattttggatgttgggtgaaggagtttgggtttatttttgttgttgagaagttattttgaagggaggattaatattaataaaggtgaaatgtgatagattttaagttgaatggtaggtagaatggtagttttaatgttagaaatatgaaggttaagaggagtggattgtagaagagtttggggaattgggtagtatgtttgattttattatattgattttgagttgttaatagggtagtaggtagtatttagtttttatttggaagtatgagatggattgttaggaaaaaagatttggttttggaattttaagatttgaaggttttagaaaggaaagttaaggatatagtttgagatagaaaagggttgaggagttaattttaaggtttttttttatagaaaaaaatgaagaggtaaagaagtagtggtagaaggtataggtttaggaaggatggggtggagaggaggtatagaaaggtatttgcggattttatggttggagattttaggtgattttggagagagaggttttaaaggagtgatgagaaataaggcggttggttgaggaatgacgatagtgaggaggtgaagatagtaatattaaataatttgattgtgagggtagtaagtgagtagatgtaagcggtgaaggttgtttgtgttttttaggatatgaatttttgtgttcgtataaatagttttatattagtttgttattttttttagcgagatttatgagcgatatttatgatgtttatttattattttttatttttatgatttttttatttcgtttttgttgggaaatgtttgtaggaaatatttagtgacgtgatacgtttttagtaattttgtgatgatattattgttttttttgtttattgtagttttttgtttattaaatgtttttgttgattttttatatatatagttttttgattttgattttattaggaaatttttaggttggaaagaatttttagttgtttttattattttttgatttttatttgtatatttttaaaatttttttaaaaaagattaaaaaaaaaaaaatttgaagtgggaaagatttagtgaaatatatattttttagttaatagtatattttgatttttagtttataaattttttttcgttttgttttttattttattatttattttttaattgtttttcgaattatgggtagttatttaaagtatttgttgttatttttgttttttttataggttattaaaaatttgaaagtaaaatttttttagaaatttaaattattttttaattttatagttttaaggatatagcgatatatttagatgttgatttaagattgagagagaaggtattgtttatttgggttatgagtttgtatttagtaaagggttttattttgttatttattttagtgaggattaggtagtagaggtagtagagggttgttattttttttttaaggtaattttttttagattggttttatgtgttattgtaaaatagtaagaagtgttagaagattgttatataatttttgtatgttgagagaaagtattttgaagttaagtagaaatggttttgttgttatttattattttttttgtatttttaagattgtaaaaaaattatttattattatttttttttattattatttaataaataaatttttaagttttttattttaattatgatgttttaaaagtatttttttttaggtagaattttatattagttgtattttgggattaggttttttatcgtgttttattgattttttttagtgggtgttttttttatttttagtttgataagtaggtgtgtttgtttttttaggaacgatttaatcgtcggagtaggaagtttagaaaggatattgtagaattttagcggtttaaggtttagtaggagaagaaattgtaggttttgtaggtgggtttttcgggtttttgggaaggattttttggagtgtttttaggagtttttatttaattattttggatatttgtttgtttttggaatagtttgatgtgggtagatggtcgtggaggttgaaaattcgggtgttggttttggcgttaaagtttgttggttgagtgatttacgtaagttaagttttttgatttttatgtgatttatatgttaaatgagaattagttttgttttgtttggattatagtagggattaaaggagattagtgtttcgttaattgaaaattattatataagttataggtttttgtttttttttattttattttattttttttttgagatggagttttgttttgtcgtttaggttggagtgtagtggtacgaatttcgtttattgtaagtttcgtttttcgggtttacgttatttttttgttttagtttttcgagtattgggattataggtatttgttattacgtttagttaattttttttatattttagtagagatggggttttattatgttagttaggttggtttcgattttttgatttcgtgattcgttcgttttggttttttaaagtgttgggattataggtgtgagttatcgtgttcggtcgttataggtttttatttttgtttttgatagtttatttttttattttttttggttatatggtatttgtagatatttagagagtgaggtggaaaggtgaggtgtttttgtttttatgagaattaaagttgtttttgttatatttgtgatatatagaggtaatattatgagggtaagaggattgaggaattagtatttttgtttagatatttagagattgtgaagggttaggagggagttatttgatattgagttttagggagttttttttttgtagttttaggtagattacgggaattataggttggaggttgggtcggagagttagtattaaattagggaatagttgggtgtttttttttagtagtggttgggttagttggagtatatgttagtagaagcggttagaatttttgatatttttagggtagtaatatagtttagaagtttggttattgatttggaaaggacggttaaggaattagatattaatatattgaaggtgtatattttgaggttttttttaagggttgggatttttttcgataggaggtagtttatttgtattatttttttgggaggtgtaagagggaggggtttgtgtgatatgtggtgatttgtggtagatgtggtttgttttaggttatagagtgttgttgtagtagaatgggtatagaagaggggtgttgttatgtttttttagtttttaaggtggtattttagagtggtttttaagagtgaattgggaaaggaatttggaggtgataggaatttgagaattaattatgatttttatttttttttttttttagaatgttggtgatttattgaataggtacgagttgttttttttttttttttatatgtgtatataaatttatataatatagatatgtatagaggttaaggagatttattgtttcgttagtttttgtattttgatgttatatggttaatggaagagttaatggaatatatgaatatatattaatttatgaaagatttttttgtttttaggagtgttttatagaaattagaggttatttatttttagttggagaaaggagttagtgaattgtttttttagtttttttagaagttttgatttgtttatttttgggatattttattttaggtttattttagtttttttttttttttttttttaatttgtttaggtttttattgggtttatttagtgtattttcgggtttgttagtttttgaatatgttattatttttttatgtttatagttattatttgatgtttgattttttgatttttggacgatagttagtttttttttaggataggtttatgtttggggttgttattgtggaggtcggggtttatggtttttaggagtatttgtgaaatttttattttgtttgtaaattgatggtagtgtttattttttataattttatttaaataggattttttaggtttttgaatggttcgagtttattagtagtgatattattttatatgtggagtttagttgagtttttgtagtatttgttgtttgtattatttatttggtatttatttattattgttgtggaagatagatttaaagatagttttttttcgtgatttttattttttggaatttatgtttttgtttggttttttttttttgagtgtaagtgggatttgtgatttgtttttaatgaatggaataaggtaaaggtgatagggtgttattttggtaattgtgttgtattgtatagaatttttttttgttggtttatttttttagagttttttttaggagttaagagtagtttttagttaataataagtagaggtttttagttttgtggttgtaagaatttgaattttgttaataattcgagtgagtttggaagtagatttttttttaattgagtcggataagaatttagtttagttaatattttgattatagttttgtgagtatttaagttgaggatttagtgaagttgtgttaaaattttttatttatagaaatagtgtgataataaatgtgtgtgtgtttttttgttttttgttttcgtttttgagatggagttttattttgttgtttaggttggagtgcggtggtgtgatgtcggtttattgtaatttttgttttttaggtttaagtaatttttttgttttagtttttttaatagttagggattataggcgttcgttattatattcggttaattttttgtgtttttagtagagatagggtttaattatgttggttaggttggttttgaatttttgattttaggtgattagtttattttggttttttaaaatgttgggattataggtgtgagttatcgcgtttggttatgtgttgttataaggtagtaaatttgtggtaatttttgtggagtaatggataatgaatataattgtatattagttatttttgtataagttttatttttttgggtgagtagggattatattttgtttgtgtttttatgtttagaatagtgtttggtttatagttggtgtttagtaaaattttaaatgtatgtataagtgaattaataagaaagtataaggaagggttttttttaattttttgattaaaaagagttattaattattttataattagtatttattgagtttttgttaaagtagttaatattatattgagaggtataaggaataaaatatggttataattataaaataagttacgtggtggtgtaaagagtgaaaattatagggttagatttgagtttaggtttcggttttgatatttaatgtttttgtaattttgggtaaattatttagtttttttgaatttttgtatttttttttttaaaataagggttatggtatttgtggtttgggattgttgttaaaattaaatatatgttgagtgtttgttaaagtgtttaaaacgtaaatatttaaatatgtttattttattttttttttttttttggtgtattttggttttattgttattttttttaaattatattttaagttttagggtatatgtgtataatgtgtaggtttgttatatatgtatatatgtgttatgttggtgtgttgtatttattaatttgttatttatattgggtattttttttaatgttattttttttttttttttttattttaaaataggttttggtgtgtgatgttttttattttgtgtttaagtgattttattgtttaatttttattaatgagtgagaatatgcggtgtttggttttttgtttttgcgatagtttgttgagaatgatggtttttagttttaattatgtttttaaaaaggatatgaatttatttttttttattttatttttttttaaaaaaattatttttttttttgaaatgaaatatggaatgataaaaaaattttaaataaattttattttattatttagaagtttataatttagttgtggaattatgattaaatagttatagaataagaagagagcgtgtaattgtattgaattaggtattatagaggttaagtgttttgggaatttagaggaaagaaatagcgagtttgggaaagttagggtaggttttgtgggggaggtggggattggataagtgggagaggaaggtgagaatattttaggttataataattatatgaatgaaagtatagaggtaggaaaaagttacggtatttttgtaggagtgtgaggaaattaatttggttaggttggaatgtttaggaatggggaagacgagaagttaataggttaaatggatgatattaagatatagtgaggtttttgagttaggaatgaagggagaagtggtgtttaatgaaagttagtttggatcgtttgtataagaaggattgggatagagagttgggggttggaaggagaggggaggagaaagagtttagtgtagatgtttagaaaaaaggtatagttatttggtaagaagttgtagattttagagaaatataagattttaaatttaagagtaagatattagttaaggaaagaatatttttgaaagtgatagttagtaatttttgtattttagatggagttaatgttattaagagaatttgtattaggagtaggaggagattgatagtttttagggtttttttttaggagagaatttagttatattgaagatgttttttaggttttttttggttttttttgacgttattatagatgattaggttaggggtgggagtttgaatagtagataattggttaaataagtttatgaggttatttgttaaggaagattttattaaagagggataatagtaattaattgaaattattaggttttttcggagatttagaagggatttatgatgaatgtgttattagttggtaagaagagtagatatagagagaattagagatgtatgtgtagttacgatgtattggaataggtgtttatgatttatgttgttgagaggtcgtaggaatatttagtttttacgtttttttggatttcgagtttattttttatcggtaggttttgggtatataatatattattgtataatggttatgagtatagattcgggagttaaattataagattttaaatgttggttttgcgatttattattagttgatttgagattagttgttcggtttttatatgttttagtttttttatgtataagatgggtatttattttttgaggttgttgtgaggattaaatgagttaatatatataaatatttattatggtgtttggttaaaataagttttatgtgtgtgattgttattagtatttttggaatttttagttttttttataggaacgagtggtgattttattaattcgtttacgtttgatatagttttttacggggtttggtttatggtggaaaatcgtattttttttatttttgtttttataataaatttatttattatttgaattaatttgagtgggttttagttttttgtaatagaaagggttgttattatgtaagttttgaaaaatgaggtgtaaattgtggatgttataaatgtgtaatagttttttagagtcggaaagggtagttgggattttggggtttttagatttgagtattttttggggagggaatttagagttttattttcggttagtagagtaaggaggtttattaagttgttttattttgaagttattaggttttaggatttatttattttttttgtgttgattttatatttcgaaagtaagtaaattttaagtaaaattattttaggggagaagtaggtattgatagattaatatgagtgtttttatttatgagtagttttattttttagtgtaagatatataaattgtttttattgatatataattattaaaagaaaaataaaataaaataatttaaaaagaagaaatataaattgtatttttgaatttaagttatttgtgggggtgtagttagtattaaaataatcgttaggatttatgtaggtatttatttttgaatgaggtagtgtagtatagtagttaagagtttttgggttagatatggatgaattggttgtatgattttggttcgttattaagataaagtgatataaggtgtgtaaagttttcgagttgtaagttaggatttttatatatatatattttagaggataatagtttttttaaaagatatagttaaagttaataaaaataaataaaaataggatttatttttttggaattataggtttgggtgttttggatatgttttattattatataggtatttgtgtgtgtttgtatttttttgaatatataatattttaatgagatattgtatatttttagggaaagtaatttaatttttaatttttggtttttgatttttattttttttttatttgttgaggtaaggatgaataatagaattttttaattgaattttaagtttgggtttaagtacgttgtgttttttgtttttgagtttgtattttggatggtttttttttttttaggagatttagtagggagatgatagagtattgtagtttatattgagtagagtaaatagatgatgttaaggagattgttagtgaagggtatgattatgtaaaataaaatataatagtgataagaataagaaaataaaatatggttatttttttattttattttttagatgttattatagtagttttaattacggtagttttaattttttagattaaagtttataggttatttaatttatgttttggtttttttttggaatttttttatttagtagtttttgagtttatagttgagttatttgtgatttatttgtttttattattttattttttgattttagatggtaattaattgattaggaagataatttttttagggttgagtgtggtttttgggttatgatttatggttatattttatgtttttttgtttttaggttttgtattttaattttatttagaagtggtaatattaggaggaaggaggtagtgagtggcgtcggttggggatggtatatatttgtttataatgataatggagataatttagtgttttagagttataggttatttagttagttttttgttgttttttttttttaagatgttttttttttttttttttttattgattataggtattttttagattattttttttagaaagttattttttatttattttttttttttaggttgggttatgtttttttttttgaatttttataatgttggggttggatttttcgtaatatttattatattgtgttgtaattttttttttatgtttttttgtttttttaagagtttttttagatatagagtaggttttttttttttttatatttttaagttattagtggttattatattgtttggtttatagttaatataaattaaatggttttagagaatgtgattatatgaattttaatattattggaagaaaataagatgaaaagaggtgagatgttttgtttaaagttatataattggttgataggttggtttaagaatttaggttttttgattttaaatttagtgttttttttatgtagttatttttgtgttaagtacggatggtggtgagtagaattggtagtagtttgagtttttaggtattttggttatttattgggtattggggaaaggatttgattagtagattgagagtttttttttttattttttattattcggttttattttattttttaaagtagttatttttattttaagttatttaggtgatttagttagggattaagtttatatggtatttgggttgatatgagttttgtatttagaggagagtaggtaattgtttttttttaggagtttagggagaaattggattttcggttttagagtttaaagaagggaatgatttttttagtgaaggaggtagtgaaggtgtagatgggttttcgggtgatagcgttggtgaaggttatttagtttattttatagttaagagatatttttatttgtcggggttgtttttttagggttagtcgtgtggggaaggagtttagagtcgagacgaagttttaagttagttttatagtttatatttttttttttggtcgtagtcgaagttttttttttcgttgtatattttcgtttattacgtttacggtgtagttgtttttatgggttaggtttatatttattatttacgtgtgttttttttttgtgatgttagtgtgggttagaatataggtggttcggttaaaacgttgggggttgtttggtgagttttgttatttgtaggagaattgagttcgttggtggttttcggataagaggagtttggggtgggaagtttgagggtttagagaaatgtgagttgtggggataattaaaagggatagatgttagtagatatgttattatttttaaggaaggtatagaaattttttttgggttttttttgttagtgttattattattaaaaatatgtatagtgtttacgtgggttaatagtgtggaattatttgggaatttgttagatatacgtttttagaatttgtattttaataagatgtttaggtgatttgtatataggtaaagtttgaaaagtttgttttagaggatgtgaaagttttcgtttagtttagtgtggttttcgggaaagtttttttgtttatcgtaagttggttggtttttaaagttgtgcgtgttagtttggattttttggggttgatatattatatttttttttttttttatttttattttagagtgtagcgatatttttttttttagtttaaattttatgatttttttttgttttttttttagggtattggtgatttatttatagtttttttttttggtaggttttttggtttatttttgggttatttattttgttttagtaattttgaaattgttagagtttgaggattattttttattattaaaaattgttgtagagttttgcgttttgttatttttagtatttataaattgagaagtttttataaatttaggtttatttgtgggttagagaattttttttaataatttcgtgatttttagggttttaggttggttgattgagaaatgatagttttgaaggggtttattttgtttattttttttttatttataggtcgttttttttttgttatttgtgaaatgatatttgagaggaagtaggggttttttacgttttaaagaggtgattataaatttagattaaagttttttttatttagaaagtatttttagatggattttattttattttgtattaatttttttatttattcgatatgcgtagattaggatgtgagttttatattacgaatgtagtatgtgtatgtgtttgttttttttttatgttttttttgagagttttataaataatgtgatatatatatatatataatttatatatatatatatgtattatatatatatatatatgtgtatatataatatatatgatgtgtatatgtatttatgggtgtttgttatgattattgttatagttataatatagttatagtgtaaattttgtaaaattttttttttttttcgaggattttttatttttttttattttgatataggttttttatttggtttatagtttaatttaaagtatagtttttttgtaaagaaaataaattaggatgagattttattagttttataaaattattagatatttaatgatgagaaaattgaggttaagaagagggaagggataagaagaagaatgtaagttggaattttttagattagtggttttaagtttgtattagaattatttggagtttttgttaaaatatatttgttttagatttaggtgttttggggtggagttgaatatttgtatttttaataattttttgggtaatgtagttgttgttgttggtgggagttttattgttttagttttgattaaatagggattatgattgttttgtttatttttgtattcgtagagtttaggatatagtaaatgtttaagaaatatttgtttagtgaatagagaaatgggtttatttatttattattttatttggaaataattttggggagagttaaaggttagtttttgattagagtgaaattttttttattgataggttattggaagtatttgtaggaaatggaattatgggaaaagtttttttagggtgatataattgtgggtgggttattttaaaattggtgttattatttattttgttatggttagtgaggaggtggttggtagagagttatgttttatttttgatttttatttaaatttttttttatattttattattattttttgtttcggaaaaggaagtggagtatagttttcgtaggatcgtttaattttgagttagattaatagaaagaaagtgagaaggaaggagggacgagttagatattatagggttaagataaatattgttgttggttattaattaataatgtttattattaaaaatttattatatattataaatgttgttgtgggattttttaatttattaagaatgatatattgttaattattattttttatattgtttaatgattattaattagatttgttgaattattttaaaattagtttaatttttttattagaaatatttatttttattttttttttttattgttataatattttaataggtagattttataaaaatttgtaaataaggaaattaaggtataggaaggaataaggtttgttaaagttatattttttagtagtggagcgtggaggttatttttaaatttaggttttatggttatttgcgttttgtggaggtttggggtttttttatttagaaatatttttatttttttttgtagcgggagggtttgttggggaaagtttcgaattttttggtttagttttggcgatatagttatcggttttcggtattttttggttttatatttaggggtatagaaatggttgggtttgggaattattatttttaataatgtttttagatttagttggttattttttaatagggtatgatggcgttagtttttgtaggtagacgtattttttttaggatgaattttattgtttatttttgggtatttatggatatatttgagaaggtatttgggtatatagaggtttatatgtaaatttgtatttttaagtgagaatgttatatatttgtgtggtaataattaggtatgtagtatatgtatgtatatttatatggaaaaagaaaagagagaaattatattgtttattttattagagtgtttttgatgttttaggagaaagagatattagaaatttagtttttagttttttttttttattttttttttttttttttttttatttttattttatttattttttatttgtttgtttgtttgtttgagaaagggttttattttggtgtttaggttggaatatagtggcgtgattatggtttattgtatatttaattttttgggtttaagggatttttttattttagtattttgagtagttgggattataggtgtttgttattatgtttggttaattttttttttttttttttttttttttgtagagatggggttttgttatgttgtttaggttttttttattttttttatgattggaaaagataaaatatatttttagttttggataggaaaaggatattagatgtatagagttatagagtattaggatttatttatttttgtggattagagtttaaagtttttattttttagataaagatggtgaagtgatttttttttgtttattggaggtaaagtaagttttatattaaggttttttgttttttagttttaagagtattattttaagttatgttgtttttttaatattttgtggggattttaatattttttttttagtgtgaggaagtgaaatagattaggataaattttttgattggtggttggtgatatttaggttatagagaatggtttgtaatttatttaatatttttttaaagtgttatttttatttttattttattgttggatttttataaaagttttgtgaaatatttaaggaaagtattttttttatttggtagatggtgggacggagaggtggagattagagagtaaaaagtgattagggaatttttggaaaagtatgaattagaattgagattttttggttttttgatttattttttatttgggatatagagatgtgtgagttagggagatatggtttaggtaagataaagatgtaagagttataggatagtataggtggggtagggtttcggtttaggttttatcgttaggagtttttttgttggttttttattttttttttttagttttttaataagagtattaaatcggtagatttttttagtaattagtaaattaaatttatttcgttgttttaagatgtttttattttggttttttaattgtgttaagaggatgttttgttgtttttttagaaatttttttaggtgtgcgaatttagaaattatttgttgttttttggtggatatttgagtttgagggggtaggaggtaagtttaagagaaagtttgttttttttttttttttttgttttttttttttttttgtttttaggtagatttggaattgtgttatggttttttttttatttgttattttatttcgagaagtaagatttatagtgttgttttagtattatttgttgtagtttttaaaaggggtagggtttataggaggtgtaggaggaggtggtggggatattttattttttgttttgtatgaaaagtatattatgtgtatagttttgagttattttatagttataattttatttaatgtttatagtaatttaatgaggttatgatgatttttattttttattttatagataagtaaattgaagttggagagttgtttgaggttatagagttagtgttagagttaggatttaaatttataataattttaaagttttataatttatgttgttttagttttaggaagatattggattttgaggaaggggaggaatttggggaaggggtgatgatttattaggaggatttgtatttttttatttttttttgattggattttttgaattttttttttttttttttttagatatttaagatatttatggatttgtttttggggagaaggaatataaaatatttaagatggaaaatgatttgtttaggtttgtttggttatttgattttttgtttttaggaatgaaatggttttaggagaggagttttttttttagttgataattttcgagtttttattattttgatagtttattttttttgggtttttttttttttgatttgtttttaagattttggattaggattttttttttttattttgtgttattagaggttgtgatttggtttttttatttgagtttttttttaggtttaatattttattgtgttttgtttcgggtaagtggtatttggggtttgtattgagtttgatatgtttcgtattgaaattattttgagttttcgatttattttaaaggaatatgtgtaaataataatttttttttgttattgaaattaattatttgtgtatgattttagaggggagaagaaatttgggtaatgtaaaaataattgataaattgtttttaaaattatttgttttagaatagagttaggaataggtatatatacgataaatatgtgtgtttaaagatatattagaatttttattattaattgttaattaattaattaagatatttatatatagatttgtattaaaatataatttataagtataatgtataaataattaaaattagtatatatttatttaatgatagataaaatggtatgttatatatatttatttagtttgaatatatgtaaatacgaatttatttataaataggagtttttagttatatttatatattcgaatatatatatatttagatttttatttaaatatattagatatatttttaaatatgtaaatattaatatatatatatattgtttgtataattatttttttaaatgtaaattttagatatatttgatttatggtatagatatatatatttatgtttggttatttatttatttaataagtatttgttgaattttcgttatttgttggttataagtgaatatagaatatatttaaaaaaatataaaatataaatataattttttatgtttgggtttattgtttgggtgattatgtaagtaaggagaaagaatttggttttcgggtggtttaaataatttataattttgttgttttttttagtttagtttagtttattttgggattttttagttttttttttttattttatagggagtcgttgtattttttaggaagcgtatggtgtgggtagcgtgttttttagtttttcggtatattacgtataattgtattttattatttttatagaagaagtagatttttttttcgtgtttttggtagatattttttttttttaaatttagtgtggatattagttggaggcgtttaatgttttttattacgttagttagttgttagttgggtcggaagtttttaggacggaagggttttttgtagagtgggtaagtaggggatttttttaggtttgggtttggtattttatagtagcgggtaaggtaggttcggtagaagttgtggtcgtagtcgatagtgatcggtttttttagggtattttgatagatggggtagttgattttatttgttaggttggttatagaggtagtagaggttatgttggttttgttgttatggtttttttaaggttattttttttgtttggttacgggggaagggttgggttatatatttatatatttatatatgtatatggttggatataggtatatattaaatatgtattagtatttatatcgttatatatttgtatttttggtagttagggttttatttttttgttaatagtagagatgggaaatagtagaggagaggaaggaagaggggtttatagtattttagaggtgattttagatgattataattaggggttggttatttttttttgtttatttagagatatttatagtataaggaaagtggtgatatgttagttgtttattgttagaagaaatatttttttgggggtaagtgggagattgggttatagagtggagatgttattttagtttttttgttatatggttagttgtttttaaagagattggaggtattagttagtttagggtttgtttattagtaagtaggagagtgtgggggtttagataaggtttttgtgttagggtgtatattgtattagtaattttaatggtgatgttttaattggtttgttgtaggttttaaaagaggttggaatattttttatgatggggaggagaaagaaaattattaacggttagaatttatttataatgacggtataatttatattgatataagtaatttggttagaatttatttataatgacggtataatttatattgatataagtaatttaaaagtatgattttatttttgtgtttgttttgtaatattagtgttattaggatttttattttataaatgagaaagttgaggtttagttaggttatttagtttgttttaggtatataagtaagaaggtgagtgattataaataatttgttgttagatttgtttttcgagtaatgttatttaatataaacgtaaagtgagttatatatgtaatttaaaattttttagtggttatataaaaatagtttaaataggtgaaagtaattttaatgatgttattttatttagttttatatttttaaaatattattattttaatatgtgatttatataaaaagttattaataagatattttatatttttaaatttgtgaaaagtttttgaaattcggtgtgttggtcgggcgcggtggtttacgtttgtaattttagtattttgggaggtttaggcgggcggattacgaggttaggaaatttagattattttggttaatacggtgaaatttcgtttttattaaaaatataaaaaaattagtttggcgtgttggtcggcgtttgtagttttagttattcgggaggttgaggtaggagaatggtgtgaattcgggaggaggagtttgtagtgagttaagatcgcgttattgtattttatttcgggagatagagcgagattttattttaaaaaaaaaaaaaaagaaaagaaaaaagagaaaaagaaaaagaaaaaaaagaaattcggtatgtattttatatatatagtatgtcgttatttagatcggttatattttagtgtttagtagatatatgtggttggtggtttttgtattggataaattagtttttgggttgtattcgtggtaggaagagtagagattggatgggaaggggaggtaataaagtgattagagtaaaaagggagtaattataaggggttaggttgattatttagtgggagaatgggggaaggtttggttttatttatagatgtgtgtatgggtgaaggatcgtggttgtagattttggttttggtatgaggtgtgggaggagcgtagggttttaagttaggagattgggatcgtttttaacgtgatattttttagttttgtgatttttggaaagttattttatatttggaaagttagtttatatttttttttttgtaaaatgaaggtaataatgtttgtttagagggttattaaaattgaatgtagtaatataaaaatattaaattttagataaatgtggttgaaattgattatttgattaatcgttttttaatgtgtattaatataaattatttgtattatggttttttgtttttttttcgttatagtaaaaataaataaataaataaataaataaataaataaataaaatagtttagtgttattcgaattttaaaggggattgttgtgttaggtggtgggggatttgggatcgtaggaggggttattatgggtagatgtggtgagggaggaaaggagagtagaagaggggattcgatgagtaatttttatattttatttgtagtgtcgaaatagcgtttcgtttatatattttcggtagaatttttcgaagtttatattttttattttagtttggattttgatgttgtgggtacgttttagagttagaagtttatggtttttatttgtttaatttgataggaagtttttgttttttagttttttttagttattgtggtttatagattttaggaaatttatttttttgtgattttatggtgtgttttgttttttattttagggattagaaggagttaggagtaaagaattggtttatttggtcgttattgggaaattttgggtaattcgagacgttttggaatttggatttatttcgttgataggtggtggttagggttttagggaatataagaggcggagttaggtggtttttttgtgttggtatttttgtttttttttttttttttttttttttgttttttagttttgtagtcgtttttttttgcgatttatgtaagtgtgattcgattttagggaaagggaattcgcgtgggttgaggagatcggagtggacgggttggggaaggtatcgtgatgttcgtaatttcgtttttgaaggtggtttatgagttgtttgtttgtattttttgtgcggggtcgttggaggatgcggtgattattttttgtggatatattttttgtcggttttgttttttcgcgtttttttagatgggggtttaattttcgggtaagattttgttttgttcgttttgttaagaggaggagtaggtagagatttttatggtttttgtgtttttgggttcgttgggagaaatttattgcgaggagtacggcgagaagatttattttttttgcgagaacgatgtcgagtttttttgtgtgttttgtagggagggttttacgtattaggcgtatatcgtggggtttttggacgaggttatttagttttatcgggtaagaagtgtagttttatttagggtttgtttggggtaggatgatgttttgttatgaggggaggaaatcgggcggggatttggatgaaaggtttttatattagggaattttaaggttatagggattttcgaggtatttttagattgaaggtagatagggttttatttggatgtgtggtagtttttggtttggggggaattttagttttagtttttagaggattttatagaggtggagtgtaaagaattgtagttttggttttatttattatggaaagaaagttttaatgtcgagtgggattttttgtagattatgggtagggtaaatttgtttttttaggatttagattggaaatggggtttatagggttttgattgttagggcgtagaggggagggaggagttgggaaggggaatttgttagtattgtttttttttttgagaaagggagggtggtagtagtttagaattgtgagaattttttatttggttttggggtatttttttgttagttttttagattttttttttgttatttagttattaggtttggaagtggttattttagaaatattttttaaatttttaattttgttttatttttatagttaggttttttttattttttgcgtagattttgtagtttttatggtattttttgtttttatttttattttttttagttattttttaatttgttgggagatagatttttttaaaatataaagttatttatttgtataaaatttttttatgtatatttagtgtttaaagaaagtttaaggtttttagtaagatatttaaggttttttgtagtcgggattttttttttttgttcggttttatcgtttagtttttttttttaaggtattacgtgtttggttagattgagttgtatttgttgtttttttttgagttgttttatttatttttgtttttaatattttttgtatatagttttttttttttagaatattttttttttttttttttatttttttttttgtttttaagtatataatttaggggtattaagtttttttttttttttttttattatatatgttttgggatatatatgtagaacgtgtaggtttgttatataggtatatacgtgttatggtggtttgttgtatttattaatttattatttatattaggtattttttttaatgttattttttttttagttttttaagttttgataggtttcgatgtgtgatgtttttttttttgtgtttatgtgtttttattgtttattttttatttatgagtaagaatatgtggtgtttggttttttgtttttgtgttagtttgttgagaatgatggtttttagttttatttatatttttgtaaaggatatgaatatattttttttatgtttgtatagtattttatggtatatatgtgttatattttttttatttagtttattattgatggatatttgggttggttttaagtttttgttattgtgaatagtgttgtaataaatatatgtgtgtatgtgtttttatagtaggataatttataattttttgggtatatatttagtaatgggattgttaggttaaatggtattttttattttagatttttgaggagttgttatattgttttttataacggttgaattaatttatatttttattaatattgtaaaagtatttttatttttttatattatttttagtatttgttattttttgattttttaatgattattattttaattggtgtgagatggtattttattgtggttttgatttgtatttttttaatgattagtgatgatgagtttttttttataggtttgttggttatataaatgtttttttttgagaagtgtttgtttatattttttatttattttttgatggggttgtttgttttttttttgtaaatttgtttaagttttttgtagattttggatattagttttttgttagatggatagattgtaaaatgttttttttattttgtaggttgtttgtttattttgatgatagttttttttgttgtgtagaagtttttttatttaattagatattatttgttaatttaggtttttgttgttattgtttttggtgttttagttatgaagtttttgtttatgtttatgttttgaatggtattgtttaggtttttttttagggtttttatggttttaggttttacgtttaagtttttaatttattttgagttaatttttattttaggtgtaaggaaggggtttagttttagttttttgtatatggttagttagtttttttaatattatttattaaatagggaattttttttttattgtttgtttttgttaggtttgttaaagattagatggttgtagatgtgtggtgttatttttgaggttttttttttgttttatttgtttatatgtttgttttgatattagatatatttgatattatatattatagttttgtagtatagtttgaagttaggtagtatgatgtttttagtttcgttttttttgtttaagattgtattggttatgtgggttttttattggttttatatgaaatataaagtagttttttttaattttgtgaagaaagttaatggtagtttgatagggataatattgaatttataaattattttgggtagtatggttatttttataatattgattttttttatttatgagtatggaatgtttttttatttgtttgtgttttttttgatttttttgagtagtggtttgtagttttttttgaagaggttttttatatttgtgggtattaagtttttttttttttttttttatttaattggaaatttattttttaaggtatattgtaaatgttttttgttttttaaatttttttttaggtttataggtagagttgatttttgtgtttttattttattgtgtgtatttttggattattgtatttatttatttgtattttaattatttgatattgatttttttttgagatggtggtttttttagggtaaggattgggttttttttatttttgaattttttagtatttaatagtgtgtttaggatgtgatagttaataattgtgagttgaattattaatttagttatttttatttatttatttttttttttataggatcgttttaggagtcgattggaagttttgagtacggagagagatgagattgaggatgtaaagtgttaagaagattagaagttttaagtgttgttggtataggttacgttattggttatttttttttttgaaggtttttttaagagattttggggaaattcgttggttggtatttgttttttggttgaaaagaattgataaattgttttcgtttatttttttgtggttgtataaaggtatttgggattttagattatgagtattagaagtggttttgatgttttgtaatttaagatttattttgtatattatattttatagagtagaaaatttaggattagaaaagtaatgtttttaaggttatatagtaaagttgaagtttatgaggaatttggattttttgatttttaatttattgttttttttattttagtttgtttgtttgaatatattatttttagatgggaagtttggggttaaaaatatatgttagtgtcgggattttagttttgattataggttgattttgaggagagtaggttgatggtgtggttatatttggattttttacgtttttttttttatgttataaagttatggaggaattatagtgtgaggatttttggtattttgattaaggagagagtgtggggataaagtaatttatttattattttttagtttttattaacgtatgttttgtagttggtgatttttacggttaaaattaaaattatatatttttttattaagttgtgttgattttaattataatttttttttgtttttaagaaattattatagttttttttatttaattttaagaaggtatagtagggttatgatggtattgtagttgtggaaatatttttgaaaagtttaatattattttgagagtataatgtagtattattattagagtatttagttaagatagtagtatagtttttattattggtaagtttattttgagatttaattatttttaggtatattagtaaatggaatgagttttggattagttgttttttatttttgttaattaataataagtatatagatgattattttggaagttatttttgagtttttttttaattatgtttgttttttattttttgaagatttagatcgaaagtaagaagtattaggtggaaatagtttttgagaggttgtagtaggagttggagtagtagcgatgttttttgttggttaggttgagggagttggagtagtagatttggaaggagagggatgaatatattataaaggtttttgaggaagttattcggtttggagtttaggttaaggagttggaggagaagtgttagtagttagtaagtgagtttttataagtgagagatattttattattttgtaggataagagagggattttacggggaagggggtgggtattatgttttgggttggagagaggtaggaaagggaagtggagagaggttaacggggtgtagatttagaggggttggagatttgtttaagttatatattgtggttatgttaaggggtttagggttagatagttttggatttgaatgttggtttttttaattgtgtgatttgagtgagttttttagtttttttaaatatggggatagtaatagtattttttttataaagttattgtaaaattataagaaataatttataaaaaatgtttggtatgatttttgatatatagaaagaatttaataattggtgtttgttatggttatgaatatgtgattttggtttatattaggtttagttgataattgaaggtaggtttttgttttttattattttttaattattgtagatataatttatttttacgataaggttgaaatagggaaattagtataaatgaattgattatagaaatttaaattagtaagaaaatatgatgtaaaagaataatttaatgagtaggtaattaaataggataattttttgtagaaggagagttttgagtttatattttaagggaaaagtgatgtatagaatttttgataggaaggatttatggaaattaaatgtatgtttttgttttttttttgtaggatgttagagttaattagagtaggtagggtttatttttcggttttgtttttttttatttaatattaagattgaatgggaaggggtaggggtatttattgttatttattttgttaggaaagtaaaggtattttggtagatatattgttttatttaattgtgtataaatagtttaaatttattaaagatttgtattttaaaggtttatttttaaattgattggttggtattggggatatatttttttttttagaagtgaagttataaataataattatgtttttaggttgatttaggaatatttatttaatttatgaaattattagtatttgagttagtatttaatattatttaaaatgtaatttaaagggagaatattttttgtagattatgataagtatggaaattaggaatattagtttgtttttttatttatttattttttatatatatttttggttttttttagaattttttaatgttattgtaaaaggatagttattaggagttagtggtattgtaaatgtatggttttttttttttttgtttgttataagtattagtagtttgtattgagatgaagagaggtgtagtgattagggaataattgttacgtgttttgtgtttattttcgtgtagggaggataaatttagggtttatgaattaggaagtgtttttaaatatgttttttaaagagtattagaggtttagatttagaagggtttggaggttttttagtttgaggaagaaattgagatttagggggtgaagagtttttaaggtaatgtagtaagtgtttaatgaggattgagttgggattagaattaggagttttttttattgtaatatatattttcgttgattttttttttttttttttttttagtttttttttttttataaatagtagtatatataagggtagtttaaggttgtttttaaatggtattttgttgttttttagagattaaaaggggtaatgatttttgttttttagtttttatagaattaaatatttttttaaaggggtttatttttaatttttgagaagtgattatttttagttttttttaggtttaattgaaatgtttattattttagtaattatatatttttagtaaaagtaaagaaatgatatttaatttgattatttattatagacgttaagattattttttagtttgattttagttttacgtggttttattcgaatatttgtttttggaatttggatttaattggttattaaatttgtttgtaggtgtgagatgaagatttttgtgagttttgaggttattttttttgattttgttaagaagattcgtgatttttataggaaaatatttatttttttagagatgatgaggatgtttttaggtaaaggggaaggcgttatagttttttttagttttattagttgtttttttgttttttatttatttttatttttttttgtttttgaaatttggttcgagatattttttttttttagagtttttttttagtgattttaatttatttaggggtattatttttagagtattttttttattttttaaggataggtgtaggattgagagtttaggagggtgaggattttttttttttattagattatagtagaagtcgagttttttgtttttatttttatattgtatttaagttattttgtttttgggggtgtttataagaagtaataagttatagatttttttttttatttttgttttttttagaaaatttggcgtattatttggaaatagatttaggtaaatagtttgggatttggggagttatttttttatttatttatttaatttatggtagtaaatagagtaataaaatgtatgaattttggagtttgattgtttgagttttcgattttagtttttgttagttttgagatattgggtaagttattaagtttttgttttataatattttttttattagtaaaatgaaaataaaagtattgtatttgttttataagtagttgtgaggataaaataaattaatatatgtaaagagtttagtatattatttgatttatagtaagtgtttaattaatgttatttatttgtgtagatattattcgttgaaaaatatttattaagttttagttttttgagagtattgtgttgggttttttattgatttgaataaaaaatgtgtaattttttaaaaattatatttatttttaaattggtgtttaatttagaagttgtttttataagtattattttatttattttggtataggtaagtgttttttaaatttaatatgtagaaacgttttttagggattttgttaaaatgtagattttgatttagtagggtgggatggggtttaatattttgtatttttaataaatatttaggtggtggggatgttgttggtttttttcgttgtattttgagaagtaaatttttaatagtattatttgttgattaggtagaagggcggtttagagaagtggtttaatggtaggttgtttaagtttagtattttttttgttttttacgtgcgttgtttgttttaggaatatttgtggttgtcgttcgttgttgatgtttgcgcgtttttttttttaggggttattattttggatttttagatcgttagtcggagtttggttttttcggaagataggaagttagtgaggtatattcggtagaagaagagtttgttagatagttttttgcgtttcgacggtttttcggcggttttgggtttttcgggtttttttttcgggcgttatcgttggtaggttgatttgtagttgggcgacggcggcggttgtacggtgggggtggtcggggagggggtgaggaggaagggagagatgggatttagcgtcgaggacggcgtttgggtcgtgattatttcgtattagtagtgttgggttagtattttttcgggtatcgatttgtcgttgagcgagatttcgcgcggcgtgagagtcgttttggattacgaggcggggtaggtgattttttataacgtttagatttaggagtttatttttatttttattgttttttttttcggtaaagttttttttttttttgtcgtttggaaaaaaggtttttgttttacgttgaaaggttgaagtggggcgcgcgaagggcggcgaagcggagacggcggtttttcgggatttagtttcgtttttggttagtgtgcggttcgggggttttttgtgttcgcgtgaggcgagagaataggggatttgagtttcgaatagcggttgtttttattttatttattttaggtttttagttttttgacgttttgagtttttttgtgacgttttggttttttttgtattttagagtgtagaattatagacggtttcggttgtgtttagggtaatagttaatttaggagttagcgggttttcggggaaaaaaaagaaaaagatatttaaaataaaatgtttaaattgttttaaaataattattttgggaaaaattagggttttgttggatttgtattaatttgtatagttaatttcgtattttgatatatatttgaagatgtttttatttttgtagggtttagggtttttttattagttttgggtggattttagggtttttttttttttttttttttttggttatttttttggatttgtagagaatgttttaagaaagtgtgatttatagatttttggattttatgtgtttaattagcgttgatgggattggagaaaggtttaaatttaatgggatttgtttgtgttggtaatttagggtcgagatggttcgagggagtagatgtagagaggaagggtgatgatttttttgtgattaagatataattttgtttttttttttagttaggatatttttgatgatagatagtgggataattattaggttttattgtttaataaaacgaggtttttgtttaggtttaattaattttttaaatatttgttattattgtagttattatttggatatagaaatagattataggttaaaataattttaaaaagtaaagtattaatttttatataagtgatgtttttttttatttttattttttttttttttaagttgaatatttatatttttatttttttattttaatttttgaaaaaaatttgtttttaattttaatttaggttttttgtagtgtaagataatattttgtgtataagaatattttagggtcggtacggtggtttgcgttagtaattttaatattttgggaggttgaggtaggtagattatttaaggttaggagtttaagattagtttggatagtatggtgaaattttgtttttattaaaaatataaaaattagttgggcgagatggtaggcgtttgtaattttagttgtttaggaggttgaggtaggagaattatttaaattagggaggcggaggttgtagtgagttaagattaagttattgtattttagttcgagtgacggagtgagattttattttaaaaaaataaaaaataaaaaataggttaggcgcggtggtttacggtggtaggtcgaggtaggtgggttatttgaggttaggagtttgagtttggttaatatggtgaaattttatttttattaaatatataaaaattagttgggtgtggtggtagattagttatttgggaggttgaagtaggggaattatttgaatttaggaggtagaggttgtagtgagttgagattgtattattgtattttagtttgggtgatagagtgagattttgtttttaagaaataaataaataaataaaataaagaatatttttattattgcgtaagttttgtttttaaagtatgggttagatgttttaaaagtatttaaagagtttggattatatgtgaattttatttaaaaattgtaatatgaattaatgtgatgtgaataattaattttaatttgattgttggggaaatagaggtttttgatataaaagaagttagataatgtggggttttttttgttttttagtgtggtgagtagagttatttttatttgatttaagtggtttggtagtttaatttagtagtagtagtagtggtagtagtagtagtattgtttaatgtttattataaaagttgtatatgtttatggttaagaaaatttaaatatttttaaagtgtataaataaaaatttttttttttatttatttaatatttttttttgttattttttatagttaaatattgatattaattttttgtatattttgtaagttttgaatataaatatatattgtttttttttttttttttatataaattagattatgttataagtattttttgtaatttttttaaaagaaaaattatgtgtaatatatgttaattgtattattggttaaatttgttttaattatatttttatttgaattttataataagtttgtgaaatatataagatttattttgttttttttatgtggtggttgagaaaattgatatatagttaaatgaatttgtttaataatttttatagttggtttttgtgatttgttgaagtagaatttatttgttttggagtttagtgtagttatatttttattatatttagatttttaaaatagatatattttaatggggttatgttttatttgttatttattgaatttatgttttagatagggtatttttggttttatatgaaatagaaaaaaaaaaaaaagaatcgatgaattataagtatattgtatttttaagtttttggtatttttaattttagagtggtttagataatttaaaagtgtggatatgtatatttggaggttttgtgtttatattaataaattgttttgtataagaaaggaaagagaaatttagaagttaaaagaaatttgggagtggttaagattttagggtgaggattgagagttgtttgaaggaaaagtagaggaaaattatttatttggtggtttagttggagttataggatggttgtgtttttgtgtttgtgatgtaaaattgttttttattttttttataggattttttgtataatttgttttgtttttaatgttttttgtaggtgtttttgaattttaagtgttgagttttgtttattattgggtaggaggtaaagagattttataaaataattgttgggttgttggattatgtgaggagtagttatattgatgtgtttcggagaattagaggggttattgtaaggattaaggtgggatttataagggaatttttttggagtttaggaatcgtgatgatagtgagttggttgtaatgggaattagagtttaggtagatgtattgtttttttggtcggtttattttgttttggatgtggggtttatttttttgtttataaggaagttttttagttttatttatggtttttatttttttttttatttttagtttttttttttttttagatttttagtgtagagtgttgatttagttatattttttagtttttggaatattattattattagtttatgtaaggttttttggttttatttgtatttttttttttttttttaatttttatttttattttttttatttttaaaggtagttattttttaatgttttttttttttaaaaaattttttaatttttaagtttaggggtatatgtgtaagatgtgtaggtttgttatataggtaaatgtgtgttatagtagttagttatatagattattttattatttaggaattaagtttagtatttattagttattttttttgattttttttttttttttattttcgttttttaatagggtttagtgtgtgttgtttttttcgttttttgttatgtgtttatatgtttttattatttagattttatttataagtgaaaatatgttgtatttggttttttgtttttattttagtttgttaaggataataatttttagttttatttatgtttttgtaaaggatatgattttatttttttttatggttgtaaaatattttatggtatatgtgtattatattttttttatttagtttattattgatgggtatttagtttgattttatatttttgttattgtgaatattattgtaatgaatatatatatgtatgtatttttatagagaacgatttttatttttttgggtatatatttagtaaatgagattgttgggttgaatggtatttttgtttttaggtttttgaggaattgttatatagttttttataatggttgaattaatttatatttatattaatagtgttaaaagtattcgtttttttttataattttgttagtatttgttgttttttgattttttagtaatagttattttgattggtgcgagatagtattttattgtagttttgatttgatttttatttataattatttgatatttgataaatttgataaaaatgtttttagtagtaagtattattaatttattaattattaaattttttttaatttaagagtatttgttttttgtgtttaggatttttttggttatttgggttttttttgggaggggggggttggtttatatgaattttaggattttttttttaaattttgtgaagaatgatgttgatattttgttagggattgtatttaatttgtagattattttgaataatatggttattttaatgatgttgatattttttttaatttatgagtataaggtgtttttttatttgtgttgttttgaattttttttaatagtattttgtagttttttttgtaaagattttttgtttttttggttaaatttaattttaaattgtttttggtagtaaaaatttttaaatgagattgtttttttgatttttttgttggttaaattattattgatgtaaagaaatgttattgatttttgtatattaattttgtagtttgaaattgtattgaatttatttattatatttaagagttttttggtgaaattatatattgtgttttttttttttgtttgatttttatagttaggattttagtattatgttgaataagagtattgagagtagatatttttgttttgttttagtgtttagaggaaaagttttttatttttttttatttagtatgttagttatgggtttgttatatatagtttatttgaatttgaggtttgtttcgtttatgtttagtgtgttgtatgtttttattttaaaagaatgttaaattttattaaatgttttttttgtatttattaagatgattatatggtttttgttttatattttattgataatatgtattatgtttatttatttatattgaaatatttttgtatttttattataaattttatttgattttgatgtagtatttttcgatgtgttgttgggtttggtttgttagtattttgttgaggatttttgtatttatttatgattttgtatttatgtttattagggatattgatttataattttttttttgttggtgttgtggtgtatttgtttggttttagtattagggtgatgttgattttatataattagttagggaaaatttttttttttttgatttgtttgaatagttttaggaggatcggtattagttttttgtatgtttagtagaatttagttgttaatttttttagttttaggttttttttttttgagagatttttaattattgatttaattttgttattaattattggtttgtttaggttttttatttttttttgatttagttttggtaggttgtgtgtttttaggaatttatttattttttttagattttttaattttatttagttgtttataatagtttttgatgatttttaatatttttgtgatgttagttgtaatgtttttttttttaattttgattttgtttatatgggttttttgtttttttggttagtttagttagtagtttattaattttgtatatttttttaaagaattaattttttattttattgattttttgtatttttttaagtttttattttttgttttgatttttattatttttttttttttgttaatttggggtttggtttgtttttgtttttttagtttttttaggtatattgttggattgttaatttgtaatttttttatttttttaatgtaagtatttattgttgtaaattttttttttagtattgtttttgttgaattttataggttttatgtttttatttttatttgtttttagattttttttttaatttttattttaatttttttttttttttttttttttagatggagttttgtttttgttttttaggttggagtttaatggtgtaaattcggttaattgtaatttttatttttcgggtttaagcggtttttttgttttagttttttaagtagttgagattataggcgtttgttattacgtttagttaatttttttgtattttttatagagatagggttttattatgttggttaggttggtttcgaatttttgattttaggtgatttattcgttttagttatttaaagtgttgggattataggtgtgagttattatgtttggttttttattttaatttgtttattgatttaatggttatttaggattatgtggtttaatatttatgtatttgtatagtttttaaagttttttttggtattgattttttattttattttattgtagtttgagaaaatatttgatatgattttaatttttaaaaatttattgagatttgttttgtcgtttaatatatggtttatgttggagaaggttttatgttttgatgaaaagaatatatattttgtagttgttgaatagaatgtttcgtaaatgttaggtttatttggtttaaagtttagtttaaatttaatgtttttttgttgattttttgtttagataatttgtttaatgttgagtatgaggtgttaaagttttttattattattgtattttaatttgtttttttttttagagttagtaatatttgttttatgaatgtgggtgttttggtgtttggtgtatatatatttagaattgttgaatttttttgttggattgatttttttattattatataatgatatttttggttttttttttttataatttttgatttaaagtttgttgtatttgatataagtatagttatttttttttattttttgtttttatttgtatggaatatttttttttatttttttattttgtttatatttgtttttattggtaagaaattttattgagttttttgaaatagtttataggtgtattatttttttaaataaatttagttattttatattttttaagtaaagaatttatgttatttatatttaagattattattgatatatgagattttgtttttgttatattgttgttttttgattgttttatatattttttgtttttttttttttgtttgttattgtggtttggtggatttttttagaggtattatttgagtttttttttttttttttttgtgtgattgttttattagcgagttttatatttttgtgtgtttttatgatggtaaatattattttattatttttaggtttaggatttttttgagtatttttcgtaggattgatttagtggtaataaatttttttagtatttgtttgtttgggaaagattttattttttttttttttatattttaatttggttggatttaatatttttggttgatagttatttttttttattattttgtatatattattttattattttttggtttgtagggtttttgtagagaaatttattgtttgttagtttgatgagttttttttttaggtgattaggtattattttgttgttatttttagaatttgttttttattttgattttagatagtttaattataatgtgttatggagaagattttttgtattgtatttgtttgggaaatattgagttttttatatttgtatgtttaaattttttgttaggtttggaaagtttttatttattattttattatatagattttttaatttttttatttttttattattttcggggatattaataatttatatatttagttgttttatgttgttttaaatattatgaaggttttgttaatttttttatttaggtaaagtaaattgaattttttaaaattattttttttttatttttgtttgattaggttattttaaaagagttgtttttaagttttgagatttttttttttttttaatttagttttattgttgaagtttttaaaggtattttgtattttttttaataaattttttatatttagattttttattttttttttaaaaaataatttattgttttattaaattttttatttatattttatattattattttttttttttttattgttttttagaatttttttatatattattgagttttttttttttttttttttttttttttttttttttttttttttgagatggagttttattttgttatttaggttgtagtgtagtggtacgattttagtttattgtaagtttcgtttttcgggtttacgttatttttttgttttagtttttcgattagttgggattataggtatttattattatatttagttaattttttttatttttagtagagacggggttttatcgtgttagttaggatggttttaattttttgacgtcgtgatttatttatttcggttttttaaagtgttgggattataggtatgagttatcgtgtttagtttattgagtttttttaaaattagtattttgaattttttatttagaattttatgaatttttttttgattgataattgtagttggagaggtattgtgtttttttgttggtgttatatttttttgttttttagttttttgtgtttttatattgatatttgtatatttagttgtaatagttattttttttatttttgaaattgtttttataggggaggattttttttttgaagattttacgtgttgtttgttgagtagggtgttttggttttgattttgagtgtttatagtagtgtgatttttgtatgatttatttggtagtatataatattagtggtatttgtgatttttttattgatttaaggtgtatttattagtgaaggttgtggtgaagtttggttgggaattaagatgttaggtgggttagtttttaggttttagtgatggtagcggtgggttgaatgagtttgtgttagggtttatagagtggtttaaattgataatagcgttagtgggttttggagggttaattattgggtttttaggtgatttgtttagatgttagtagtggtagtagtgggttagatatgtgggtaattttttaggtttttgggtagttggtgtgaaatgggtaatggtagtagtagtggtggaataatttgttaggatttaagtagtttgtgttggtgttggtggtggttgtgataagttgggtaggttagtattttgatttattggtagtatgtgtgggtgggtgttagttgtggtggtattggtagattgagttggattgattttagattttgataggaatgatttagatgttagtggtggtagattgggttgggtaattttcgggtttttggatgatgtgtttgtgtattggggggatgggattaggttagtagatttgtttttagggttttttgtaatgtatttaggtgttagttgtgatagataagagatggagaggtttttagattattggtagaatgtttaggtgtgggttggttgtggtggttgtattgtagttttgtaattagggaaggtagggttatttttagttggcgtattatgagtaagtagttgtgggaagtgttatttgtttatatttttgtttatattagtttatagtagtagtggtgggatttgttttaggaacgtgcggaagtgtttcgtttttattttttttttttaatttagttttggtttggcggtagtagttttagttaggtttaggggtagaatgtagattcgggtggttgagtttttagaataatgattataggtttgttatcgggagggtaggattttttttaggtggaagagtaaggataagtagttatagggagtgtagtttttttaagttttggttttatagtagtttgtagtagtggcgatgggatttgtttaggggggtgtatgggagtgtttagttttttattttttttttgttaggtggtagtagtagtagtagtaatagtagcgttatattagttcggttttaggttaagatttatgtgataggtattattttgggtatttgggatgtattagtttttaaaaagtttttttttaaagtttatgtttgtaattttagtattttgagaggttaaaataggtggattatttgaggttaggagtttatgaatagtttggttaatatggtaaaatttcgttttttttaaaaatataaaaaaattagttagatatggtggtgtgcgtttgtagttttaggtatttgggaggttgaggtaagagaatcgtttgaatttgggtagcggaggttgttagtaagttaagattatgttatcgtattttagtttgggtaatagagcgagatttcgtttttattaaaaaaaaaagagaaaatttatggttttttttgtttttttataattatattttaaatgtattttttttgtatttagtttgtttttgttttaggattttgttgttttttttagttgatgtgattttagatttttttttttattattttgattttagtttttatgttatttttttagggaatttttttttgattatatattataaaatagatattaggttattatttattatagatttattttatttttttgtatagtgttaattattttttttttttaattttaatatattgtttgttattatttgttggaatataatttttaagagtgtagaattttgttaattttattattgttgtaatttagaaatattttggtatattacgggtatttaataaatgaatttaggagatatatgaagtttggagataatagatttgagagaatatagaaaataggaggaaaagttaataagaaataatttaggtagggtatagtggtttacgtttgtaattttagtattttgggaggttgaggtgggaggattatttgagttttagagtttaaggttatagtaagttacgagtgtattattattagagtttaggtgatagagtaagattatgtttttaaaataataaaaatttagttagttgtggtgatttatatttgtaattttagtaaggtaaatataaaatagtttgttgaaaggtatgaattgggtttttggagggaggtatggggtagggaaatgtttttatttgtaagaagtattgtagaaagtttattatatgtgtaagtagagttatataaaatgaaaaattatgaatataaaaaataaaaagggaaaatttatatgagtttataatttagagaatagagaggaaatatgttttttgttattagcgtaattttataggtagtttcgtataatttttttttttttatttttaagatggtaatttaaaaaattagaaaggattgttgggcgcgatggtttacgtttgtaattttagtattttgggaggtcgaggtgggtggattatgaggttaggagattaagattaatttggttaatatggtgaaatttcgtttttattaaaaatataaaaaaattagtcgggcgtgatggcgggcgtttgtagttttagttattcgggaggttgaggtaggagaatggcgtgaattcgggaggtagagtttgtagtgagtcgagatggcgttattgtattttaaattgggagatagagtgagattttattttaaaaaaaaaaaaaaaaaaaaaaaaaaaaattagaaaggataagaaaaatagttgattgtgttaggatgtaaggttgaatttttgtatattttattttttttgaggtagtgtttattttttaaggaagaatttttgggtgtgttatattggaggtttttttttttagggagagttattatttgttttaaaacgttggattttagtttaagggtattattgtaggaggaataaaaaggtggagttacgtaataattcgtttgtgtttcgtagtaggttttttttgagggatttttagaaatgatagtatgtgtgtagagaatagaaagtaaagttatattgttatagaaggtatagaaggaaaattttcggttattgttattagtggaatttttttgtagttagattgaggtttggtggtatttgagatataatatagatatagatttataaatatagatttttaggttgtttatttaataagtttttattgagtatttattttgtgtttagtattgtattaggtgttatgagaatataagagtagtataagatgttattcgttttttaggagtttataaaattagaggtagaaataagatgtatatgtgatttaggtagtatgtgatatatataaagtgggtagttttgagataatggtggttaagtgattattgaggtttagagtcgttggaatagttttttataatagggtggaggatttaaaatttggatgaataggggttggtagagtatttggaatgggtaaggataagattgggagattaatttggttggagtaggggagtttgtgttaaattgtgatgatgaggggtatttggatagaggttgggttcgtgggtaatgagaagatatgttatttttttttttgatatgaagatttggtgggtttgtggttttttgttgtttttttttttttgtttttttatttttatttttttttaggaaagtggaatttggatgttggtagggttagagatagaggtttaatattttgttggggaattcggttagaattttcgaggtaggagaggttttgttttattggatgtttgttttggtgtttttggatgtgttgattaagagtaagatgttttggatttttaaaattttttttataaggattaatttagagataatttattgattagtgattatagtttgtattttaaagtcgtgtatgtttggatttttttttaagattatagatagttttagggagttttatttttttggttatggaaatatgtttagttttggttttagagaagtttggattttattttggattttatgagatgatatgcgttggtattttaggttttaaatggtttgggaagttttagtggattttgtttatttttagtattgttatgtatgtttaattttgagttggggtggggtaggtttgtttaaaatgttagggaaggtgggtagtagagtggatttgtgtaagaaggaatttggggggtttaaggatagtaaaatgattttaggcgtaattgattggtttttttgaggttttgttatattgggtaagaaaatgttgtatcgggtttttattttagagagtgtagagttagggttaaggtcgtggttaaaaaggaaaggagtttttatggattttagggttagaagttttttcgggaaattagtaggaggtgggaaaagagttttattagggtagtagatggagtaatagtattgagtgagattttagggggttatagtaatggggaggtggttattagtggatatggggttttttgttttaggtgtttaggttaggtatttcgtttttttattgagagttttggaattttaaagaagtgaagtatttgagggttggggttgggggtagatgttagggtttagggttttagtaggaggcgtgtttttggttatttgagttataggaaggggattaggcgtcgggtgaaggtggtagtgaaggtgtagatgagtttttgtgattttgcgttggtgaaagttacggtgttttttttataatttagggcgatgtttatttttcggggtcgtagtgttgggaaaagtttagtttcggggttggtgttggtttagatgtcggaggaggagaggcgtagcgtttatacgttattttttggtcgtagggagaggtttttttttttttttatagagtttttagttatttttattatgtagttttttagaattttttttttttttttttttttttttttttttttatcgtttaacgattttttattttcgttcgttttttagtcgttatatttatttttatagtcggttttttttttttttttttttttttttttttttttttttttattttttttttttttatttttagattagttttttttttttatttttattttttagtagattttgttttaggtgaagtttttgttgtttagtattttaggtttatagttaaattgttgggggtgtaggtaggtatttttgtataggttggtgtaggttacgtatttttagttttttgatagttgtaggtatttattggtcgattgtgggtttagggtgacgtttattgtggggataagggaaaaaaaaaaaaatagtattattgttttgttttgttttttaagttagagggaataaaatttattttggtagatagcgttaaataaaattaaagttgtatatattagtaatataatttaatatttttaatttggtataagtgtgatatattttttggttttgtattttgttaaattattataattaaattgttttataaatatgatatattgaaatttaatttgattgttttcgtttacgttttgattttaaataaaattttttataagttttttttatttttggatttttgggtttaatttattattaatattatttaagtgtggattattagtttttgaaaaatttgttttattttttttataatttagaaaaaaagtttttttttttaagtaatttttgatatgttttttggtaattcggattagttgtagtgaaaggaatattatgaaatataataattatgtgaatgattattataaaatgttggtttatttatatagtaattgggattttttttggttgttgtatttttgtatgatgaagttgtatggattttattttaattattgtattggagttttataagttttaagagtatttgttttatgtttttgttatagtttgtatttataataatatttttaattttttgaataattttttttatattagtttttttttttttttttaagtattttttaaaattgattttgttaattttagtaattttattgtataaattaagttgttatttatgggattagaaaagagggtattcgggtattcggtaattttttaagattaatttgaagaatatttgtttttgtaatttgtttatttgtttttttgatttttaggttatgataaagtttttttagaaagggtataaatgtatgaaattgttttggagtaattttatttttttttgtagtttgatttttaatgttatatttagttcgatatttttgaagtagaaattggcggaaggtgttattttttgtgttaattgttagatgatgttaggtaattatataggtgagtttttatgtaagagaaatttggggttgggtacggtggtttacgtttataattttagtattttggaaggtcgaggcgggtggattataaggttaggagatcgagattattttggttaatatggtgaaattttatttttattaaaaatataaaaattagtcgggtatggtggtgggtatttgtagttttagttatttaggaggttgaggtaggagaatggcgtgaatttgggaggcggggttcgtagtgagttgagattatattattatattttagtttggaagataaagtaagattttattttaaaaaaaaaaaaaaaaaaaaggtcgggcgcggtggtttacgtttgtaattttagtattttgggaggtcgaggtgggtggattacgaggttaggagatcgagattattttggttaatacggtgaaatttcgtttttattaaaaatataaaaaattagtcgggcgaggtggcgggcgtttgtagttttagttattcgggaggttgaggtaggagaatggcgtgaattttaggaggcggagtttgtagtgagtcgagattgcgttattgtattttagtttgggcgatagcgagatttcgtattaaaaaaaaaaaaaaaaaaaaaaaagaaaagaaatttgggatagatgtggtttttgagttttataagtttttgtaaagtattatttgttgtaatataagtatttagggtttttgtaaattgtttaattttagttttaaaattattagtttgttttgtaagatggtttaagaaattttgaataggtattgatagagtgggataatttttattattatttttataggattttttataattagaataatttgataggtaaaatttgacggtatttatagatagtttagatattaataaagaagttataattatttaaggtttaattattgttaatttagttttgttatgggattttattttgtgaattagatgaagtttttagggtttcgtttgtttttagataggtcgatttttttaatggtttttacgaaagtaagtgtgaaagtgagttaggaggagattattagtttttataatttaaggggtattatttatattttggtttatgtggatggcgttttttggtggttggtatgtagtgtataatttaattgtagggttgagagggggtataatagtggggtttgtggtggatatggtttttggttttaggttgtttttgttgtttgttttgaatataggagttatgtagttaggaagatgagagaaagttcggttataggaaaaggattggtggtaggatttgtgaggataggaaaaagaaaagtaaatatagggtagagaaggattagattagtaagtagaggtttttattgtagattaaagagtaggttgattagaaagtgtaaagagggaggggggtttttattgtgtagttgggaaattttttttgttgtaaaaggggttatttgggggaaaagtgagtagttagaatttttgtaggcggagttttttatatttgatgtatatttgggaaatattttttagatatttatttgttttatattttaagttttttagtagtttttttggggagaaaaaaggatagtaatgatttaagtttcgaaaatttatgagtttattttttgttcgggtagtattaattttttgatagggatttatgtttaagataagaggtttttagaagagtgaggatcgataaggtgatggaaaggagttgggtgcgttttttttacgaggtagttttgttttgatttttattttttgtgcgttttttaatttttattttggaatttttttaggtttcgttgtagagagaggagtttatttgagaatttttcggttttttttttaattattcgagtaatgggttttttaatttagaatttttttcgtggatatttaagaagatgatatatataataagttgttatttagttttttttatttttttttatatttattttttaatttttatggtaattatgaaggggagaggaaaggtatgattatttttaaataagtgatagaaaaatagtggtttaaagatattagttgaattagggttttagaatattagtagattttatatttagggcgttttgtttattaagttatgtttttaatttttttgttttgttttattttaaataaggttagtgggttaaggagttggggttatatagagaatttataaggaggagagtaagtttttagtttttaatgatgtgttttgttttttagaaaggtattaggatgaattatgggatgtgagtatttttggtattatattattttttatgaatttaaatgtatttggttagaagcgggggaatataaataagggggatgaggtacgttatggagaggagatttttttatttgtttaggaagtttttcgtgttttagaagggaaagaaaaaagtataagtattaatatgaattaaataagattttaatgtatttgtatttaatattgtagtagagatgggatatattagtgaataaaataaatgtggttttttttttatggagttgatattttagtggggttattgtataaaataataagaaaataaataaaatcggtataatgatagaagttataatggttgggagatgatatgggtaatttttttgggagatatttgcgtagagaattgacggataagaagtattggtcggatgaagagaggtaaggtaaaataggaaagggtttagtgagaacggtagaggttagattgcgtagggttggatatgtatggtaaggagttttatttttgttttacgtatagtggaaatttattaagggttttaagtaggggtatgatatgtgtgattcgttttatatgtggttgagattgttgtgtaatttttagagtttatttttttttttttttttttaataatagaattttcggagttattgttggttaggcggttatttgggaagattatattttttagattttttacgataaggtttggttatgagattaagttttagttaatggaatgtgatagaaagtaatgattataattttgggtattgttttttaaaaaaagaaaattgttttttattttttttttattttaattgaattttggatatggtggtggtgagtttaattttgattacgtagtagaggataatatttttagaagttggtggaagaattatatggaagtaatttagttttttggataagtttatgtatagttattgtgatagttttagattttgtatttttgaattgttaattgaggtagaaataaatttttattttgtttgcgttattgtatagtagtgagttaaaattttaagtgattatttatttggttgttttatagagaagggattaaggaggtaagaggaatatggggaggttggttcggaggtttttgtcgtggattaggggagagttaaagatggtttgaattaaggtggtggtagtagggagaaaaagagagaagtaatatattttaggtattttagagatagatttaattggatatattggttaaggataaataagaatagagtatggtttgtataggggggagaatggtggtgttatttttgtgatagataggtggtagggtagggtgagtgggaagagggttattttgagatgtttagatttttttttgtgagttaaaagtttttttaatattttgtattaattgatttttgttttttttttatttattttataaatatttattaagtgttttttaggtattaggtatttatttagaagttttagaatagttaaaaaaaaaaaaaaaaaagagagagagagataaatttttatttttgtagagttgatattttagtagggggaagtagataataattaatgtagtaaatatattatattacgtgagtgatacgtattacgggaaaagagagtagagtgaagggggatgggagtaggggtcggtggggtgtaggttggttttttggagagggtgagatttgggaaataaatggaattaataaattgtggttgttgatgattgtttttaaaagtttgggaagagttgtgagttttattttagaggaataagataagaagttagaggtatattttaatttttcgttatgaagtaagtgtttagagattggtagtatatttttggttaagttttttaatatgttttttaaaatatgtaagtttaaggcggttttagaggataggtaataaaatagatagtgtgttttgatagttttgttgataaaggtggtataaaagagtaaatgaatggagtagtagttggagtgtgggttagaggtttatttgggtatattttttgatatggaagtttttagaatagtagaaagggagagaattatataggagaaagaagagttttttaaaggttaaaggttgtgagtagtttagagagggtgggtttcgagagttagggtagggttggttttgcggagaagaggttgaaagatttaggagtttttatttatagttatatatagggtttttggagggaagtgattcgtttaagttttttggaggattttttttatttaagatatttgaagttgttatgaaataggtagagtcgagtagtggggttgcggtaatgagttatggtaagttttcggaggggatgtgttcggttattaatagagagtattaagaaagttttttacgggggtgtatagtaggagaagtagggtataagtatgttatttgattttgtagggtttgttcgggttattagggtaggatgtagtgtttttttgggttttttttgttattttaatttttttaatgtttttttgatgtttttagtttataggtttgtttttttttttttattatttttattaaaaggttttttttattttatatattttgttttgttgttttttttttttatttgtatttttattttattttaatttttttgagataggattttattatgttgtttaggttggttttaaatttttgggtttaagtaatttgtttgttttagttttttaaagtgttggaattataggtgtgaattattatattagttttatttgtatttttttattagatttttggattttattttaggttttttttttattatattttgatagttaaataatttttgggaaaatattaatgttaattagggaggtagttgtttagtttttacgtagtataattaaatttaaataagtatatagataaaatttattaatattatttttttgcgtatggttggttatttagtttttttagtattatttattaaagagattgttttttttttattgtatgtttttggtttttttgttgaaaattagttggttgtaaatatgtgaatttatttttgagttttttattttgttttattggtttatgtgtttgtttttatattaatatatgttgttttggttattatagttttgtagtatatatatatatgtatatatatatatatatgtatatatatatatatatatgtgtgtatatatatatatgtgtgtgtgtgtgtgtgtgtatatatatatatatatatttttttttttttttttttttaatggagttttattttattgtttaggttggaatgtagtggtataatttcggtttattgtaatttttgttttttggatttaagtgatttttttgttttagtttttcgagtagttgggattataggtgcgtattattacgtttagttaatttttgtatttttagtagagatggggttttattatgttggttaggttggttttaaatttttgatttcgtgattcgtttgtttcggttttataaagtgttgggattataggtgtgagttattataattggttgtagtatattttgaagtaagatagtgtgaggtttttagttttgttttttttgtttaggattgttttggttatttggggttttttgtgattttatatgaattttagttttttttttatttttttgaagaatgttattcgtattttgataatagggattgtattaaatttgtagattgttttgggtaggatagttattttaataatattaattttaatttataagtatggaatatttttttatttgtttgtgttttttttaattttttttattagtgttttatagtttttattaaagaggttttttatttttttggttaattttatttttaggtattttattttatttttgtagttattgtaaatggggttgtttttttgatgttttttttagttagtttgttattggtgtattaaaaatgtagtagattttttatgttgattttgtattttgtaattttattgaatttgtttattagttttaagggttttttggtggggtttttaggtttttttatatataagtatagtcgttacggaaaatagtatgagagttttttaaaaaattaaaaatagaattattatatgatttagtaattttattattaggtatttatttaaagaaaagaaaattagtatattaaagggatatttgtatatttatgtttattgtggtattatttataatagttgagatgtggatttaatttaagtatttattaatagatagataaagaaaatgtagtatatatatataatggagtattatttatttataataaatttgagtttatggaagtaagatagtagaatagtaatgattagaggttgggaagggggttggggagaggagggtggggagaagttggttaatagatataaagttatagttatatgggaagaataaattttagtgttgtgtagtattgtagggagaatataattaattataatttattatatatttttaaaaagttagaagagaggattttgaatgttttaatataaagaaatgataagtgtttgaggtgatagatatattaattattttgagttgattattatatattatatatttgtattaaagtattattttaggttaggtatagtggtttacgtttgtaattttagtattgtgggaggttgaggtaggcgattatttgaggttaggagtttaagattagtttggttaatatggtgaaattttgattttattaaaaatatagaaaatagttaggtgtggtgatgtgtatttgtaattttagttatttgggaggttgaggtaggagaatcgtttgaatttaggagatagaggttgtagaggtaggagaattgttttaatttaggaggcggagattatagtgagttgagattacgttattgtattttagtttgggagatagagcgagattttgttttaaaaataaataaataaaaatttttatattttataaatatatatattatatagtattaaaattaaaagagaaaatataaaataaaaaaagaaatttattagtattaataatattttttatattagttttaagttgatattattttttttttttttttttgattttattttattttagggagagttgtaatttgagtgttttgagttattgagggttaggtttttgttttgagggttatttttttgggtgtattaggaaaaggtattttttcgggtaaatataatggattttagttttattatatttttagttgtgtgtttttgttttatatagtaggtatttatatatggtaggggcgtgaggagaggaaggagaagagaaacgggtaaaaggagatgtagaaaatgatttagttaaagagtatgacgagagaaatttgagagaatagaatgatatttggaggaaaagagggggttagagagatattttggataaaataagaataagagtttagagtttaggagttaggatatttgggtttaagttgtgatttgatatttattttatggtttgggataaattttttttattttttggattttagtgattttattagtaggggttgaattggaaggtttaaaatttttgttagtttttattttgtatatttgaatttataataatgaggagtaggtggtcgtttttttttgtagtttgttttagtgtatatattgtagagtttgttttgttattttttttttttagttattgttttgttattagtttgggattttatttttttagagattttgggtggttttgttgttgatagatagatttagttattttaaatagtgtaagtgggggaatattattagagagtttttttttttttagtttatgagagtaggaaggttgagttttttatttttttaaaggggattgggttttttttagggtaagtgtgatttttagaggttttcgggggggaggagatgtggtgttattttagttttatagttagttttttagttttaaatttttttttttttattattaaagtttttttttttaggaggtgtttcgaggtttttttgtttgttttttattttgttttttgtgtggtaattttatgggttaaagaaaatttggttatttttgttttttttttttagttattttattttttttagattttttgggtttttgagaggagttgttggttagtttttttttagttatttttaattataatattataaaaagtttttattagttgttaaatgtttgttaatgatttgttaagagggtttgtgatggtagtgatgaggatggaggatggtaaatgatattaataatttttttttttattttttattatattatttagttttttgaatagttttgtgtaaaaagtttattttttgaagtgatagtatgttagttattttattttatgtttatgtaatttatagattaattggtagtagtaaggattattatttttatgttttagatgataaaattgagtttttaagttttttaaggttttgtaagtgaatggtagggttgggatttatcgttttggtttttggcgttttgtttagggacggttttttatttgtatgagttttgtagttggttgttgcgttttgttttttagttcggagatgattagggttagtcgggtaagtttttcgacgtttcggtttttgaatttttttttgtttttcgtgagtttttgttttagtttcgttagttgttttagtaggtgtttttttcgtttttttaggaattgatgattttgtttaaatttagttataatgtattgtttttggttttggagttttttttgtagggggtaggaaggggagaagggttgatatttttgtttagggtggagggtttagtgttggaggtgtgtaaggttggttcgtttatttcgttattttcgtttaggaattttataggatttggagtgggaggagttatagagggtttttggtttatatttcgttttttaaagaagattttagtaatgaattagtttagtttattttattattatatggttaaaattttgtttttatttgattggttagttataatttgttttagttaaattagtacgttttggggtttttagagaaattttgtgggttttatttatgagtcgacgtattttttttttttggataaaatttgttattttttttaggaagttttgtttgattaatgttatttaagtttgattagttttttttttagtattttattgtttagtttaaaatatttatatgtattttatttttgttatgtaagattgtattttgtttttttagtaaaattgtgtgacgtttgtgtttagggattatgtttttttttgtttttaaattttttttttagttggggttgggggagtttttagtggttttgttgattggtgttgagttgggggtagttatgtatattgagggtttggaggggtttttggatttggttgtttttagtttattgtttttttttttttaggtttaatgatttattattggttttgattttattatttttttattgtttatttttttaatatatatagttttttagaaaattagaattatttgattagttttttttaattttatttttaattaagtatataatgtgttgtttgttttttaattatagttgttttttggtattagtgggtgatgggttttaggatttttttttttaaggatattaaaatttaaggatgtttaagtttttatgtaaaatggaataatagttatataaaatttattatatattttaaattattattagattatttataatgtttaatataatgtaaatgttatataaatagttgttatattgaattgtttagagaataatgataagaaaaaaaatttgtatatgtttagtagagacgtttttttttttttttgaatatttttgatttatggttgggtaaattcgtcgttacgaaatttatagatatggaggaggttttattgtattggtaattatgattttgggtttggattttattatatatagtgttattagaattggtagatttgttttagttgttttttagttttttttttttagtttttattttggagttagttttttttttttaaattttttttatttttaggtaattttgtttttttttttttttttgaaaggaagaatgaagttatattttttttagttttttggtagaagagaattagtagttggatatgggttttgtttttaaggtgatagttatagaaaacggaagggattttagttgatatttaggtagtttatttgttttttagataagaaataggtttaagattatacggtttagaaagatagtatttgggttaaaatttaggtttgttattgttaggttgatatttattttttttgtgagtagcgtttagaaatattttttagttgtcgtttatttgtttaggtttattttgttttatacgggcgtatcgttttagggttttttgaaatagttttatttattagcgcggttaggatattagtttttttttttgtttggaagttttgaattttgtttttgtttttttttagggtatttaggtggtttaggatttttttttgtggaaaaataagtagtggtaataggtggatgttttgggttggggtaggaagggagatttaggttgagttttttgaggattgtaaggtggagtatttagagaaggtggtaaggtattttcgggggtgaagagggtttattttgtggggttgggcggttttttttatgaggacggtcgtgtggggtttgtgttttcgggattttcggtatattacgtatagtagtttttcgtcgtttttatagtagtagtgtagtttttttcggtgtcgttcgtataattttgtattttgttgttttcgggttatttttttcggttgtttgtttttgtttatttttagtcgtttaatgttttttattaggttggttagttgttatacgggtcggatgtttttttttttaaaaggttttttgtagagtgggtagacggggcggttttttgagatggggcggacgtttgtggtgtagttgcggtagaagacgtggttatagttaatggttatagggtttcgtaggtaattaagatagatggagtaggttatttttttttttaggtttcgtagtggggttgacgtggttatggtatttttagtttagagaggttttcgtttattggtgaggattttttttttttggagacgcgatatagagttaggagtaagtatagtaaaggggtaaaggtggtagtttgtatagggttgttagttttagtatttagttaatcgatagatattattagtttttataaggtttatataatgttaacgagaagaggattttatagatttagtttaatttttttattgtatagataaggatatggaaatttagaaagattagtttggtagagtgaagagtaggatagttattagtttatattttgttgttgggagagttttaatattttttttttttatttgttggaaaatcgttgtaatgtattaattgtaataaaaaattttttattatttgttgggaaatttataatgatatatatataaatttataatgtttattgtggatatagtgtttttttatttaattgtgtaaagtataagatatacgagtagttatgggggttttgatagagttaagagatcgttcgtttttttttttggttttttttttttgagatggagttttattttgtcgtttaggttggagtgtagtggcgtgattttagtttattgtaattttcgttttttaggtttatattatttttttgttttagtttttcgagtagttgggattataggtatttattattatatttggttaattttttgtatttttagtagagacggggttttatcgtgttagttaggatggttttgatttttcgatttcgtgatttatttgtttcggttttttaaagtgttgggattataggcgtgagttattgtatttggttaagagattttttttgtttgttttttaaggttttaggttttaagaattaagagagggtaatgtgatatggtttattttgtaaatttaatattttgggtggttgaggtaggaggattatttgaatcgaggagtttgaaattagttttagtaatatagtgagattttgttttaattaaaaaaatttaaaaattttttaaaatattttagtgtagtagtatgtatttgtagttttagttattgaggaggttgtggtagaaggattatttgaatttgggaggtggaggttatagtgagttatgattgtattattatattttagattgggtaatagaataagagattgttttaaaataaataaaaaattagaaaatattaaaaaataaataaataaatagtattgaggttttttattaaaattcgagaagtattaggaagttttaggagtttgattgttagtatttttttttgtgagtatttttttgggttgttttatagtttgggtttaatttgttttttttagaaggttggattttaaatatagttttttagaggagtatagtttagttttagtggatttgtttttggttgtaattgtttcgtttagatgttaggaatttttaggtggttgtggttgttatgtgttgtgaggttttggtttgtatagggagcggggatatatagaaaggattttgtttttgtttatttttgtagttttgatttagttttaggttgaggttatgagttttagtatatttaatttaagagtagttttttgtttttgattttgtgtgataatatagaagttatttaagtattgagttttagtgtatttatttgtaaaatgggaagagtgatatttatttttaagggtttttaagtaggttatgtgaaagaattatgggaaaagtgttaagtataagtttggtatatagacggaaatttaggagagaatttataatttttggtttttaaatttagtgagtgtttaaattataaataaagagttaaatttaaaagtggtagtaaaagaggaagtgagtagaattagttatagtgatatacgtgttatagagtttaataatatcgttatagggtagtatttggaggatttgtttttttatagatttatggaaggtaattatagtagcgttgggaagataattagtagggtatagaggtgattgcgaggttggaatgaagtaatttgaattataggtaaattaatattattaatgattatgtatggtgaaagtttattataatagagtttagtggtttttgttagtagtgatattaatgggatagaaataaaatttttagtttataagatttaagagtaaataaaatagggatataacgtttatttattgagggtttagtgtaataatatataaaaagtgttttataacgtaaaaggattatataaatataagagatttttatagtgttgataataaattttaattggaagtattaatggatttaggtatgtgtgattttaagagatataatgaggggaaaattaagtatttttaaagtttaaatgaaggatttaaggaatttaattgttaagtgaaagtaatattaagtttttatatgttagtaatgttggtaggaatgttaggaattggtcgggtacggtggtttatatttgtaattttaatattttgggaggtcgaggtaggtgaattataatgttaggagattgagattattttggttaatacggtgaaattttatttttattaaaaatataaaaattatttaggtgtggtagtatgtatttgtagttttagttatttaggaggttgaggtaggagaattaattattttaattcgggaggtagaggttgtagtgagtcgagatcgtgttattgtattttagtttgggtgatagagtgagattttattttaaaaaaaaaaaaagaaagaaatgttaggaattgtttggtttaattttttggttttattgttgaggaaataagtttggtttagtagttttttagttgtaatatattgtaagtgtttggaaagaggaaaaaggagtggtattgggcgtgtttgtgggtttttaagttttttattatgtttttttgttaaatggtttagaagtttaaaagttgaggtttttttttgttgaaggatagtttgtgttatttttgggttgggaatttattttgtaatttatttgtaaaataagaataataaaaggattatgaaggtttagttatagttttttttttatgtaaaataggatattttattatttaggttttatgttggggtttgatggtttttaaattttttgaaattgtttaaaaattattgtatatgtattagatatttaaaattgtttggggattatagaagaataattttttgtaagattaattagtaaataagtagaagagggataatagaattagaaaattattttgcgattgttattataatagtataaggattattaatagatgttaaaattattaggtgaaaagttttgggggatgagatagtatttatggtgttaaagtattaatgaatggattattttttgatatattttcgtaaggaggagatttagtggttattttaattaagtgattaaatttagcgttattagtagacggggtaaagtggtatgtgttttttggtatggtattatatgaattatataatattatttatgaagtgtttgtgttaaaaatgtttgatttgaatgaatttagttaagattttagatttaatttttagtttataaaaaatataaaggaaaggaatattttgaagtatgttataattgaaaaagtattgatggaggaattaaattatattataaggaaagaattagataaatttagaatgttggatattgtatatggtaattggtttagttttttaaaaagttaatgttataaaaaaaaaattttcgaaagaattgtttttgatttttatagattaaagagaaataataattaaatgtaatacgtgaattttgattggattttgtaaaaagaaaaaaaaggttataaaaatagttttggaattattgtgggaaatttgtaagtaggttgggtgttagattatattaaaaaattatttttttttttttttttttttttttttttttgagatagggttttattttgttttttagagtgtagtggaattatttgggtttattgtaatttttgtttttttggtttaagtaatttttttattttaggttttcgagttgttgtaataataggtgtatgttattatatttggttaatttttaaaggtttttgtagagaagagttgttattatattgtttaggttggttttaaatttttaggtttaagttatttttttattttagttttttaaagtgttgggattataggtatgagtaattgtattatgtttaaaattatttttttaatggtatttattgaggttatgtatgagaatgtttatattttttatttatttattaatatatttatttatttttgagatggagttttttttttgttgtttaggttggagtgtaatggcgtaatttggtttattataattttcgtttgttaggtttaagcgatttttttgttttagtttttttagtagttgggattataggtgtttattattatattcggttaattttttgtatttttagtagagacggggttttattaggttggttaggttggttttaaatttttgattttaggtgatttatttgttttggttttttaaagtgttgggattataggtgtgagttatcgcgttcggttgagaatatttgtatttttaggtaatggatgttgtagtatttagagttttatgttttttatttaatttgaaatggttttttttttttttttttttttgagatagggttttattttgtttttcgagtgtagtggaattattttggtttattgtaaagtaaaataaaaagttagaaaagttttttggggagggagttatagttttttattatatttttaaagaggtttgtagtaattattaaaaatggttaaattattgatatagagattatggtgtttgatattttgtagaagtttaatatatatttattgaataagtgaatggatttaggggaattgtagataatgttagttgtatagaattatttgtttttgagagtttgttataattagataaatgaaatatagtattatttttatgattaatttttttttttgtttatatagattttttttgaggaaattgaggtttagtagggttaagtaatttgtttaagagtatatggttaggaagtagtgtttggtgttaaggtttttgtttaatttattatatttttttttttatttaggtatattgtaaaatggggtttaatattagtttttttgttaggaagtttagatgaggttatttatatggaagggttttgtaagcggagtaatgttgataaaagaaagggggtatatattttgttgatattgattaaaagtattttagttttagttatgataaatttttatatatggggtgagtaataaagtgtttttgttggatagtagtttttttttttagtgatagaggattttaagattttagaattaggagaaatgaggttgagtatgagagatgtgagtagattagaataatcgttttttttttttatatataattttgttaggtttaatgtaaaatttattttttttaaaaatttttttttaatttatcgtattttgttatggttttgtttttttatgtcgttagtatattttttgtgattttaataggtttttataataagaggtaatattattatttttttttttatttttgatttttgggtagatagaaattaaaattagagttaaaaaaaaaaattttagagatgatttattttatttttattttttttatttagatgagaattttgaatttgaagaagttattttatgaatttttttgtattagaggttatatatttttgttgggggtgagggggtatttttttgtttttttaataaattagaagcggtcgggcgcggtggtttttgtttgtaattttagtattttgggaggtagaggcgggtggattatttgagatcgggagtttgagattagtttgattaataaggagaaattttatttttattaataatataaaattagttaggtgtggtggcgtatgtttataattttagttattgggtaggttgaggtaggagaatcgtttgaatttaggaggcggaggttgtagtgagttgagattacgttaattgtattttagtttgggtaataagagtaaaattttattttaaaaaataaaaatgaaaaaataaattagaagttagttgtaattttatagaattaggaagatgtaataaataagttttgtaatgttttggtattttttttataggtagaattgtagatattttttatttttttttaagaggtttttttttttttgaaatttattttttttttataagtttttggattttataaatatttaatttgtatatgttaatagattggttaaggtgatattatgtaattttaagatgtggatgtatgtacgattattggttttaagaataattattatgagttataaaaattagttaaaagtcgggtacgggggtttgtgtttgtaattttagtattgtgggaggttaaggtaggaggattgtttgagtttaggagtttgagattagtttgggtaatatagtgagatattgtttttaaaaaaagaaattagttgaattagttgggtgcgatggtatatgtttatagttttagttatttaggaagttgaggtaggaggattttttaagttcgggaagttgaggttgtagatagttatgattgcgttattgtattttagtttgggtgaaattttggtttgttttcggtttttagatgttatttagagaggtgttttggtagatagtgaattttaaatgtggattttggggtttaagaaagtaaatggagaggtttgggtttttattttggtttttagggtattagtttaggttttttttgagtattttaagttgttttttaagtatatgtttggatttttaaataagagtaaagtatttgtaattttaaagtatttagtttagagttttattttttgtgggtattttatttaagggtttttgggttttagattaatttttatattttaatttgagataagtaaattttttatggggtaaattttcgtgagatatttttaataaatttggagaggttagaattcggggtaaaaagtaagtgatttggatgtgtatattaggagtgattgtatttttattggttaggttaaaggtttggattttaggttgttttaggagattttagtgattgtggatgatgcgtttttgtggttatatttggtttattttttttacggagttgagtattagtggtgttttgaagtatagtgtaggttataaaaattattagggttttgaacgttagaaatttttatagggtttaaagaggggtaggaggtagtagttagttgggaggtggatgagataaggcgttaaattgttttggttttgtggttgatttataggggaaaattgagggttttttatatttgtgttagaatatttgtttaatgttgaattatgaattaagtttttttgtttaaaatatttttaagtgttatttggtgttttgtattaaatataggaaggaatttttttttattttgtggaatggtttaaattttgattatatattagatttgtagtttttaaattggtgagtttttaaaatatatttagattaattgatttaggatttttagaggtggtttaggttttggtattaaaaaataaattttttaggagattttaaagtttatttaggattgtgaattattagaattttttatttatagaggaggaaagtgagtgttagagtttcggatttatttgtttagtagtagagttggttggtagtaaggttagtattagtacgaggtggggtgaggtgtattttttagttttgggttttttttattttattatatattgtattttggtgtttggaaaatgaatttttttttgtttatatggagtgttgtggagggttagttttataggtagaggaaattattcgtcggagaaagggtagcggtgaatttgaggagttgataattggttataggtggagtgtagtgaggcgagtagaggaagggtggagaaataggagggaatagattatgtaagattgtgatttaggttaagaattttggattttattttaatagttttgggaagttattgagggtttaagtagtaggatgttgaaagttatttaatagttagtagatgtttattaggtgtcgattatgtgttaggtatcgaggttatagtagagaataaaagtggtaaattttttgttttattagaatttatatttagtgatttgaggaattttttagaagttgaaattagatttaattgtgggattattaaatttttaagggttttttgatttatataaatttttttttttttttgttgttttagtgttgtagttattttggttttttgatttttaaatatattcggttacgtgttaaattgttaatttgttcgggtgattaattaggttaaattttttaatggttttttggtgttttaggaataaagttaaaatttttgtttttttttttttttgtgaggaggttgttttaggagattttagttggatttttagataattatggtttagtttgtgtttttaggtttattttttgttattttttattttaaatttatagttaaattaaatcgttttttatgttttaaagtgttatgtttttttttggttaagtttttcgataatgtaattttttttgtttagaatattattttttttttatttagtaaatgttttttttagtttgaagttttagttgaaagttattttttttggtaatttttttttgatttgttagattgggtttatatgtagtttagttatatagttttaaaatattttatgttgtattttgtatttttttgtagttttaagttttgatttattagtgtaattattcgtttaatattagttttttttatgaaataaggagagagattgtgtttgttttatttttagaatttatatattatttggtatagagtagataataaaaattgattgagaaaataaagtataagtatagagtatttgatataaagaagatgttttttatatatttgttgaaggaatgcgaataattttagttatttgttttttttttttagtaagatggtagtaaattggtagagagagaagtaatttttttatattttttgtagtagtaagaatagtgggttgtacgttattagtaaattatcgtatttaaggtttcgttttagtaatttatagaaattaggagaagaaaaagttgtgtttgagaaaatggttgttgtggagtaaattgtaatagtgagaattatttttttttttttttttagttttagatttaggtatatattttataaatagagtttatttttttaggttttgagttttaaatgaatggaattttttttttttttttttttttttttgtatgtatttgggtggggggttgttaatatgtttgtgaggtttatttatgtgattatgagttgattttatttaattgttgttttttaattatataatttttaatgtagtttattgatagttatatgagttgtttttagtttgggataattataaatattgttttagtgaatatttttgtatatatgttttagtatatataggtaagatgtatttttaatttgattaagtaggttaaattgtttttaaagtgattatagtgttatgtagtttgtttagtaggttatgagtatttatgatgttttatagttttattaatatttgataatattagttttaatttttgttattttggaggatgggatatagaatatttgtgtgtgtgtgtgtgtgtgtgtgtgtgtgtgtgtgtgtgtgtgtgtgtatttaattttttaaaaggaaatagtatgagataggtttaataataggttaaggaattttatagtagtagattagatattgtgtttttcgatttaattagtaaatgttgtaaatgtttatttttggggagagaaggggaagggtttatttagtttttgttttttttttttttggtaatttattatttatgagttagtgagatggagatattttaattattaatttagggaaagggaggaatttaagttattagtaagggagttagtgttttttattaaatttgagatatttgtgatattatattttagtatttttgaaatgtgattaattgtatgttataatttaattggtaaaatatttttttgatgtggagtataaaataagggtatataaaagatttggtggtgttgtggtttgaatatgttttttaaaagtttacgtgttggaaacgtaattgttaatgtaacggtattaagaggtggggtttttaagacgtgattgggttatgagggtgtaatttttatgaatggattaatgttttttttgtaagagtttattggttagaatcgtgagttgaataaatatttgttgtttataatttatttagtttgtggtattttgttatagtaatagaaaatggattaagataaatagtattttagatttggtgagatgtggtatattttttaaaaagtgttgttaggattatttttttagtatataggattttatttttgttatttttttgttttaaattttttagttgaggttgggtttggtgttttatgtttataattttagtattgtgggaggttgaggtaggaggattttttgaatttaggggtttaagattagtttggttaatatagggagagattgtttttaaaataaaataaataaataaaaataaaaataaaaataaaaataaatatattaaaaaaatttttattagttgaggttaaaattgtataggtggtcgggtacggtgttttacgtttgtaattttagtattttgggaggtcgaggtgggtagattatgaggttaagagatcgagattattttggttaatatggtgaaatttagtttttattaaaaatataaaaattagtcgggtatggtggtacgcgtttgtagttttagttattcgggaggttgaggtaggagaatcgtttgaatttaggaggcggacgttgtagtgagttgagattatattattgtattttagtttgggtgatagagcgagattttgatttaaaataaaaaaaaaaattgtatagatatttttttttgttttgtattcggttagttttaatttatttatttagttttaaattttttttcgttttatttaattttttggttattagatatattgaattaggaagatagttttttttttattttttattttttatttatttttttgtatatgtttttttttttagtttagcgtatttttgaaggtttgaatataatttgtttttttatttgtgaggtgttttttgtatttattttatttttgagttgaatgtatttttttttttgtagttttgtatatattgtatttttataatagtattattatagtgttttatatagtagtattttttattcgttaaagatatatttatataggagtttttttaatttttaggagatgtattttaaaatttttagtggatgtttgaaatttgttttttttatatatatatatttgtaataaagtttataaagtaggtatagaaatagattaataataataatataatagaataattataataatatatcgtaataaaagttatatgtatgtggttttttttttttttaaattattttgtattgtatttattttttttgtgatgaaggaatagtgggagggtaagagattttattatgttatttagaataatgtatatttaaaatttatgaattgtttatttttggaattttttgtttattgtttttgggttgaggttgattatgggtaacggaaattacggaaaattaagttatggataagtggttgtaattgatatttttatttgtttttttttttattagaatgtgaatttaaaggttatgttttattgatttttttatttttaatatttggtataaagtagggggtttgtaaatgtttgtgaaatgaatgattttttttaattttagagttttgttatttttattttttttttttttattatatattttttttttttatattaaaattttgttttagtagtaggtttttagggttttttttagattagatatttttgtttatatatattatttagattttttttggtttttttttatatatatataattttggggggaagaataaaattttatttttataaagttggtaaaatttaatttattttgatgttagttaatttatgtttttgtttttttaaattaattttttatttttcgtgttttttttattttgattttgggggggtttaagtttgaagttattttaagaagttttaatatagattatggatttttttcgggggtttgtagtgttttttgtggtggttatatataatttgagtttaatttgttatttttttgtaggaagtgatatttaagaagttatttattgttttaggtttttagtttttttattttttaataaggggaaaatattttgttaagtttattaggttatttgaggttgaggtaaggttatataagtacgagtgttttattagtaaaaagttttataaaaatattatgaaagagtataggagttaatgtgaaaagagtttttaatagttaaagttatagtaatttgagtaataaaattaagtagtattggattataaattaaagtataaaataaatgtttttgagtttatattgaaattaatgattgaataaattaataaattggggagaagagagaaataaattttttatgtagaataattgtaaataataatatgtagatatttgtttttaagaagggggaatataatttttggttttttaggtatgggttgtatttagtgatttttttttaaagaggataatatacgtaaagagtggaaaagagattaattgtatagtggagaaatttgaaaaatattattttatttaaattaatattaagttataaattatgttagtatatgtttttgatacgatgggatgataatggtaatttatttttgtggttttttttttagttatttataagtttagttttaggagaaaaatattaaattttaatagaggggtattttataatatatacgattagtattttttaatgttgttaaggttattaaaataagtttgagaaatttttatagttaagaggagtataaggagatatgataattaaatgtaatgtggtaatttttatgggattatgaaatagaaaaagtattgaggtaaaaattaaggaaatttgaatatattatggattttggttaataataatgtattgatattggttaattgtaataaatgtattatattgaggtaagatgttaataataggggattcggtttggagtatgtgggaagtttgtattatttttttaatttttttgtaaatttaaaagtgttgtaagaaataaagtttatttaaataataaaattgtaatttttgaaatataaaaagtttattttttttaaaggtgatttttttgaatttggggaaaaatatgttagggattatgattttagttaagagttaaaaataggaggttaaggtatgtataaacgaatgttattttttttttttttgaagtatatataaatcgtgggttaaaatttgaaatttattggagatttggaagtgtgttttttttatttattttatagagttaaatttatattttttttttaaggttaaatagggagaaaattagtaagaaaaatgttaatgagttggaaggagtgaaagtatagttttaagtatttgtggttaaatcggtttatttcgaataaaaaaaaaaaaagaaagaaagagaaagaaagtatgatattttggttagggagttggattagtcgtttatttattaggttttaagtaatcggacggttatttaggtttcgtttatttttggtttcgtagattagaatggatgggagtttgagtaggatattagaaagcgagaaagatttaagaggagggggagaatgtaaggataagtaaataggagggatttggttggtagggaggacgtagcgaatttgatttttttttgagttcgttcgggggtttggtttcgttttgaattcgggttcggcggttgcgttgggtcgttttaaattcggtgagcgtacgagattgttgtttcgttgtatgttttatgtgtattttttatttatcggtttcgagtttcgggtcgcgaatttcggtcggcgtttttttttttttacggcggtttgtttcgggtttcgtttttgtacgagtaattagcgcgatagttcgttttcgtttcgtaatttttcggttattcggggtttttcgtcgagatttttttcggattagtttcgggattggtttttgtcgaatttcgtcgtttaatgggaattttagttttttttacgttattgattatcgggtaaatttttagatagtcgcgggcggtggggtattaggggtagcgaaatggaaattgaaattaggcgggatcgaggttgcgttaagagtcgtagtttgagtttggcgcgtaattggggtggtttgttatacggtttaagggagtaaatgttaaggtttaggagttatttacgtaggatttttgagagggtaataattttttttttatttttcgagattttttattgtttaattttggttttatgttggatttagggttcgagggcgttttgaggcgaaggtggcgttcgttaggtgtttaatattaaatacgaagttttcgtttttaacgtggtttaaatttgtttttaggataaagtaggattttagtaagtaaatatttttagagatttatttacgaaaattattattttttaggtaaaataacgtttaattagatagttattgtcgttattcgacggaaggaaaaattgaggttttaggagtttaagggtttgggtttagtttaggggggttgttttcgtttttcgacgttgaatttagaaattagaggttataaagcgggttaagatttgggttttttaggtttttggtggggaggtttttaggaggttcgggcgcgttttcgtttacggtttcggaagttgacgtcgtcgaagcgtacgtcgttgtttagtttgcgttttttttttgttttgtttgtagtcgtcgcgttcggtttagtcgtagggttatgttttgtgttgcggttgtcgtgttttaggcgtcgtcgcgttaagattttcgtttttttcggttagttaggcggtagcggtatttagttcgtgtattgggttggtagtaggttgagaagaggcggcgtaggtttttcgggttagttagtgttttgtttttaagggtagagatttagttggggatattggtcgttcgtttaggtagtggtgagagggtgggttatagttgtttggtatttatgaatggaggagtttagggttttagattttaaaatttgttgaatttttatttttttttcgttgggggtagggaaatttgtattgtatttaagtaatgtatagtggagtgggtgggatatttagaagaaattacgtttatatttaatattcgcgttttttttttttattttagtttagtattttgttttttttttttttgtttagtagtataatttacgttgttttttcgggttgagaggagtgtagattttatttgttgagtataattttggcgggtttgtgttttggaggtggttttagtatttatttagatttttttgatatttgtttttttagttggtggtgtgggaagaaagtgtgtttaatatgttttttaaataatgttttgtcgtcgagcgcggtggtttacgtttgtaattttagtattttgggaggtcgaggtgggcggattacgaggttaagagatcgagattattttggttaatatggtgaaatttcgtttttattaaaaatataaaaattagtcgggcgtggtagcgcgtatttgtagttttagttatttaggaggttgaggtaagagaatcgtttgaattcgggaggcggaggttgtagtgagtcgagatcgttttattgtattttagtttggggacggagcgagatttcgttttaaaaaataataataaaataaaaaataatgttgtgttattaagcgttttttttttgttttgaggtttttggtttatttatagattattttgggtagattttagttataaatttattattttatttaaaattttttatttttttagtatatttagaggggtatggaagatttttgtaggggttggggtttttgatatgatagttttgtttaattttttgattttttttatgttatttttttttcggtttttgtgtttttattttatatttggttttgaaattttttgttttagttttttgtatggttgttcgttttttgttagttatgtttatattttagaaaggttttttttttttatttagttgaaattagttttttattatgtattattttgtttttttttttttatgtatttgttgttatttgaaagtattttgtttatttttttgttaatgtgtttattttcgattttttttttttttagtgtacgttttaagagagttgagataatatttgttttttatgtatatggtttttatgtaaataaatgtttgttaaatgaaatgagtttagtgtgggtatttttttttttttttgtaaaaaaattttattattattatattttaagttttagggtatatgtttataacgtgtaggtttgttattatttagtattaggtatattttttttaaagttattttttttttttttttttattttataatagtttttggtgtgtgatgtttttttttttgtgtttatgtgtttttattgtttaattttttagtgtgggtatttttaaagttgtttggttttgtttggttgggtattagttatgtattgagttttttttttattatattatattttgattgatatagttttttaagtttaagtaagggtaatagaaatggatgttgggaatataatttttgttttgtgttggaggagatagttttggagtagttttgtagttttgtgtttttttatagttttttgttttatttaaggttttgaagtagagttgaaatttttttttttagttttttatttttgtggttatattagatggaggttaaggtagtatatggggttgggtaagagttttgcgttgaattttttagtttgttatattttgtgaggttttggggtagttgtttaatttttgtgtgttataggttttttttttgtaatatggaagtagttagatttgtttcgtacggttattatgaggtttaaatgtaaagttttgaaatagtgaattagtgttgattaggttaaagggtatggtataattatttgtatttgaaataaatattttaaatggagtaagaagatttagtaggtatattttttgagtagttttggtttaattttaggaggaattaaaggtcgttgtttaaaaatgagtttgtatatgatagggtataggaaatgttattttaaaatatggtattttggaaattgagaaaatagtagaaataggaaggtttttttgattttttgtttttttttgttttgaagtaggttatagaaattagagtttttttcgtttttttttttttgaagtaggttataaaatttaggaaggttattttttgatttgtttttttttttttttttttttatttgaggttttttatataataggtatttttttttatgttttgagggagggattgttatataggtatgttaagaagaaattgaatagataggtttttttaattttttagtttattatcgttagtttatatatttttgtttttgtaattatatatttgtttgattgtttatataattatataaatgtttttatttttttgggttttcgtttttgaaagtttttatgttatgtaaaatttggataaaataaatgtgtatgttttttttttgttagtttgttttttgttattgaagttttagtataaattttgtgatgggtaaggaaaatatattagttttttttttttaagtttagtataaatatattgagttaaattatattatttagaattttaggattttaagaatattagagtgtttggaaagaggtttttaaataaaaaataaataaataaataaataaaaatttgaaaatatgaaatttttattggtaaagatgtaaagaatttgtttgaattttttgtgtgaaggatattttggtattagggttagaatgaataaatgaatatttgtaaaggaaaaggtaaaagttatattaatgaaataattttaagttaatatttttgttttttggtagaggtataagttaataaataatttttgtgttattaaaatttgtttgtttttgtgttaagaattggttgtaggataaaaaataataggtttaattgttttttttaaaaggaaaaaaaggtattttgaatgttaatagtattaattattgggttttgaatagaaagcgtaggttgaattaattttttatatgatttgggatgttatttaaaatattttgtattttaaatttggtgatttttaaatgtttattagtttaaaagttagtgaaaatatattgtataatatataatgataaatttaatttaaaaaaaaattttttttttttttttgaaatagggttttattttgttatttaggttagagtgtaatggtgtaattatggtttattatagtttcgattttttgagttaatgtaatttttttattttagttttttgagtagttgggatagatgtgtgttattatgttcggttaatttttgtattttttgtatagataaggtttggttatgttgtttaggttggttttaaatttttggatttaagtaatttttttgttttggttttttaaagtgttgggattataggtttgatataacgcgttcggtcgatattgtagtattttttaataggtttacgtaaaaattatttaattttttagggtagtttaattttgatttagtattttagggtatttagagtattttttaggggtagatattaatttgtagaaaagtgatattaatggaaatgatttttggttaatagtaatgttaatgaattttgtttagtggaggtatagaagatgtatgtttagtgtatgtatatttaattttttaaattttttttgaattagttttttttttattagttttttgttagtatatttttgatatatgtttattttgtataggatattgttattgatttttaaaaattatattttggtaatatattgtattttattattatgttttttaattttattataataatttattttttttttatttttattttattaatttgttggagaagttagtttatttattttatagaatgtttttagtattggatttggttgattgtttttttatggtattaattaatttgtttttttattttttgtgtattttagataagatttataagataataaaggatgttatgtagttattttttattttaagtaattaaatatttttaatattttttattatatgtttttaatttagatattattagttcgtttttttttgttatagaggtaagtattattttgtatttttgtgataattattttttagtttttatttttatttatttaaaaggttttattagatttggggtttttgtttgtttgtttttgagatggagtttcgttgttatttaggttggagtgtagtggtacgatttcgggttattgtaatttttgttttttgggtttaagtgatttttttgttttagttttttgagtagttaagattataggtgttcgtcgttatgttaggttaatttttgtatttttagtagaaacggggttttataatgttggattaggttggttttaaatttttgattttaggtgattcgttcgtttcggttttttaaagtgttgggattgtaggcgtaagttatcgttttcggttgggtttaattttttaaggagaatattttaaaagtagtgttgtgtatttatggtattatatttagaggtatatgattttattttattattagtgatggtagatttgatggaagatttaggtattgttagtttgatttttttattttttagtttgtgagttatggatttattgttttttagttttaaaaatgattttgaattttttaattatgttttttttgttatttggttttgaagttttgttagtagagggtattggagagttattgtagggaaaaacgattttgtttttaggttttggtgtgttgtttgttaggtttttgtagtgagtgtatggtttagtagtatttgtttttgtagtatttaaaatttatttagtgtttagttattttagttatagttagtaatatttagtagtgagtagtttttttaggtattttttttgaaggggttttatattggagtgtttttggtatgaatagtttttgtttgtattttagagagtgggtttttagtaagttttgttatagtagaattattttgatgtttttattttttttgataaggttagattttatttttttttgtttttttaaaaatggattaattatttataaatatttatttttttgttttagtaaattttttttatcgttttattgaattatttttatgagtatataaatatgttataatatatcgttttaaaaattaaaataagataaattttttgatattataagtttttttgtttttgtttttgttttgtagagttttgtttttgttatttaggttggaaagtaatggtacgattttagtttattgtaattttcgtttttgggttttaagtgatttttttgttttagtttttttagtagttgggattgtaggcgttttttattattattttcggttaattttgtatttttagtagagacggggttttattatgttggttaggttggttttgaatttttgtttttaggtgatttattattttttttttcgttttatttcggttttttaaagtgttgggattataggcgtgagttattgcgtttggttagtaatataagtttttaaaaggtttttgttttaggtatttttttatttttttgttttatatttatagtaaaattagaaaatattgtttgtatttgttttttgtttttttttttttttttttttaattaaaaattgtgaaatatatatttaaaagtgtatatataatttatatatatattttaaagtattgatgagataataaaggatgttatgtaattatttgttattttaagtaatcgaatatttttaatattttttattatgtgtttttaattaatagattattttttttttttttttgttagagttgtatttttttgtgataattattttttagtttttatttttatttttattttttgagatagaatttcgttttgttatttaggttggagtgtagtggcgtaatttcggtttattgtaattttcgttttttgggtttaagcgatttttttgttttagttttttgagtagttgggattataggtacgtgttattatttttagtaaatttttttgtatttttagtagagatagggttttatcgtgttagttaggatggttttaattttttgatttcgtgattcgttttattagttttttaaagtgttgggattataggcgtgagttatcgtatttagtttttatttttatttttaagagattaggttttagttagttatttaggttggagtgtagtggtataattatagtttattgtagtatgtgaattttcgagtttaagggatttttttattttagttataggtttatattattatatttagtgagttttttttttcgtttggttttattttttttttttttttttttttttttttttttttttttgagatagaatttcgtttttgttatttaggttggagtgtaatggcgtgatttttgtttattgtagttttcgttttttaggtttaaataatttttttgttttagttttttaaggtagttgggattataggtgttcgttattacgtttagttaatatttttgtatttttagttgagacggggttttattatgttggttaggttagttttgaatttttgattttaggtgatttatttattttagttttttaaagtgttggtattataggtgtgagttatcgcgttcggttttagtgaatttttttttttattattatttttgtagagatggtgtttagttatgtcgtttaggtttgttttaaatttttggttttaagtaattttattgttttaattttttatagttttaggattaaagataagttattatatcggttattttagtttttttttttatttatttatttatttattttttattttttagtgtttattgattatttttgggtgtttttcggaaagggggatgtggtagggttataggataatagtggagagaaggttagtagataaatacgtgaataaaggtttttggtttttttaggtagaggtttttgtagttttttatagtgtttgtgtttttgggtatttgagattagggagtggtgatgatttttaacgagtatgttgtttttaagtatttgtttaatagtatattttgtatcgattttaatttatttaattttgagtggatatagtatatgttttagagagcgcggggtcgggggtaaggttatagattaatagtattttaaggtagaagaattttttttagtatagaataaaatggagttttttgtgtttatttttttttatatagatatagtaataatttgattttttttttttttttttatatttttttttttttttttttataaaattgttattgttattatggtttattttcgatggtcgttgttttttcggagttgttgggtatattttttagacggggtagtcgggtagaggcgttttttattttttagacggggcgggtgggtagaggcgttttttatattttagacgatgggcggttaggtagagatgttttttattttttagacggggtagttgttaggtagaggcgttttttattttttagatggggcggttgggtagaggcgttttttagtttttagacggagtggcggtcgggtagaggcgttttttatattttagacggggtggtcgggtagaggagttttttattttttagatggggtggtagttaggtagaggttgtaattttagtattttcggaggttaaggtaggcggttgggaggtggaggttgtagcgagttgagattatgttattgtattttagtttgggtaatattgagtattgagtgagcgagatttcgtttgtaattttagtatttcgggaggttaaggcgggtagattattcgaggttaagagttggagattagttcggttaatacggcgaaatttcgtttttattaaaaatataaaaattagttaggtattgtagcgtatgtttgtaattttaggtattcggtaggttaaggtaggagaattacgggagtttaaggtagggaggttgtagtaagttgagattacggtagtatagtttagtttttgtaatagagggagatttaagggaaagggggagagggagagggagaggttaaggtttagtttttttttatatttttttgatatatgtatgtatttttaaataggatattgtttagttttgtttatttttaaattttgtatacgtggaattgtaatgtatgtgtttttttgtgatttgtttttatttttgagatttattattttgatgtatatagttttggtttgtttatttttattgttgtgtggtattttaaatttgaaagttttatgttttttttttttttattttattatttttagaatttggtttgtttttatagttttgttgttatgattaatgatgttatgaatatttttatatatgtattttggtatatatttgtaagattttttagaatatgtaattagtaatgaaatttttgagttttagaatgtggttgtagtatatatagtgttattttgtgaggggagattattttttaggggttgtataatttatattttttttagtggtagatgaaatttttattaaattatatttgtaattttatttggaattgttagatttttgattttttgttattttgatgtgtgtgaaatgttatcgtatttggttttaatgtgtatttttttaattattaatgaagttgagtattttttttttttttttttttttttttttttttttttttggttagttgtatttttttttttgtatagtgttttttatgttttttatatttttttttattggttatttttagtttttttttggatttgttattaaaatgttaagggtttggtttaggttgtttattgtatagtaagttaattattgagataataagtattgtgagggaagaaggttttatttaggtgttgtaatcgaggagattggagattagttttaattttgttttttttttttaatagattaaaattaagggtttatagagtagggaagaaaggtaattatatatgggaaaataggaattagggaggggaaaggaagaggagttggttaataggtagtttggggttagttaggtagttatgaagggtgaggggtttggtgttttagtagatgtagtgaaaggtaagttttagttttttgatattattagggagttttgatcgttaattttttgagaaaggaatttagataagataaatgtaagttttttaagttttaagatttgtagggtaaatttttatgtttattaaaagaaaaaaaaatataattagttttatgggataaatgggttggttttagatttatgggaaatatttgttttttgtatattttggatattaattttttgttggttatatgtgttataaatatttttttggagtttttggtttgttgtttttttttttttatgttattttttgagaagagagaagtatttgtttttttattttaaagtagttaaacgtattaatttttatgttttggatttttggtttagtttaataagttttattttgttttgagattataaagataatttatattattgattaaatattttttagtttagttgttatagattgaatgtttgtgttttttttaaaatttatatgttaaaatttaatttttagtgtgatggtatttggaggtggggtttttgggaggtgattaggttatgagattagagtattattgaatgggatttgtgtttttatgatagagattttaaagagtttttttgttttttttattatgtgaagatataatgagaagttagtagtttgtaatttagaagagaatatttatttgaaattgattgtgtattttgagtttagattttttttatttttagaattatgagaaataagtggttgttatttaagttatttagtttatggtatttttgttatagaggtttgaataattgagatatttgttttttatatgtaaatttttatatatttggaattaatttttgtgtttagagtaaaatatatatttgtttttttttttttttatatggttaattaattattttagtgttatttaatgtatagtttttaattttttttattgttttatattgtaagttttgttatatgttatatatttatttatgtttttattaatatttattgagtatttattttatgttaagtgtttttttgggttttgggaataaagtagtgataaaatagataaaaattttagtggagtttgtgttttgttggaggaaggtaaattacgaataaagtaataaaaaatttgtaatatttcggatgtagtggtttatatttgtaattttagtattttgggaggtcgaggcgggtggattacgaggttaggagattaagattattttggttaatatggtgaaatattgtttttattaaaaatataaaaaattggttgagcgtggtggtatatatttgtagttttaggtatttgggaggttgaggtaggagaatcgtttgaatttgggaggtagaggttgtagtgagttaagattttgttattgtattttagtttgggcgatagagtaagatttagttttaaaaaaaaaaatttgtaatattagatggtggtaggtattatgaattaatataaattaagaaggggaatagggagtggggagaaaatattataattttaaatagggaggttagagaagtttttatagagaaagtgatattttagtaaatgtttgaaagaggttagagagttagttttgagaatatttgagagaaatgtgttttaggtaacgggaagagtttgtataaaggttttgaggtagaagtatgtttagtaagtataaggagtagtagggatgttagtgtgtttggattagagtgaaggaggggtgaagtgtaggatatgaggttattaggtgaagtgtaggatattagtttaatagaagtgagcgggtttaggttgggtaggattatgtggtttattttaaggattttgattttattttgagtgagatggatggtattaaaaggataaaggattgataggttttgattataggttttaatttatgttttaatttttttggtttttttgttgaaaatagaattaaggaagtaagaatggaggtagtaatatttgttagaaggttattgaaataaattaggtaagtgatgatgggggttgtgggaaatagttaagtttagaatatatttgaagatagaattaatataattaggtatggtgtgataggaataatagagataaggattatgtttaggtgtttggtttaagtaattggaaggatgttgagatgggaaagatttgatagagggtaggggcgtgggtagggatagattaggggagaggatttggatttgattttggatatgttaattttgagatgtttattagatatgtaaaatgtagattagattttcgatttatttaaattattattagtggttagtttttttttttattttttagatttttgggtaatattttattttttttgatgtatatttttgcgttgtagtttgggattttatattttaagtaagatatttttatatataataaagtttgaaaagtattgttttaagtttttttttgtttttttaagtatttttaaatgtgtatttaatgtttttataattagaaaagtgttataaaattaaatatttaaaaaaaattttttatttttttagtatattatataattattttttatagagtttttaatattttgtagtaaaattattgtttataatttttttgggttatagtttttggtaaatgaagtatggtataggatgtttgggattgtggagttttttaggatataggattttttacgtaaaattagaaaggtttcggataaattaagaagagttttttattttagacgtgtgaaattagtggtaaagtgtttgttttagggaaggtagtatgggatagtgaattagagtggatattgaatttgggtttatttgtggaaggtggttttgttataggaaagaggttttaatttagattttaagagagggtttttggatttcgtgtaagaaagaatttagggtaagtttgttggagtgtatagtaaaagtaagtttagtggtgaaagaagagttattttatagatagagtagggtattttagaaagtaagaggaggaacgcgtttattttaggtataatgtttatatatatatttttatatatatattatatatatatatgataaaagaagattatgggaagatgtgttttgttataagagtttgtgataaaggattaatttttttaattattatgttttgtaagaattaatattattatttttaaagtaaaattagaagtgtttttgttttttaggtgttaggattatttggatattgttaaatttgggttagtttagtaaatttttttttttttttgagatagagtttttttttgttgtttaggttagagtgtaatggtataattttggtttattgtaattttcgttttttgggtttaagcgatttttttgtttttatttttcgagtagtcgggataggtatatgttattatatttagttaatttttgtatttttagtagagacgggttttacgatattggttaggtaggtttcgaattttttattttgtgatttatttattttggttttttgaagtgttgggattataggtgtgagttattttttttggtttagtaaatattattaatttatttttttaattataaatgtttagaggttaggaatatttatatttttggaaatgtatttcgttaagttgtagttttatttttttagtttttatttaaaatggcgtcgttttggttggaatgtttttgatagtttttatgaatgataaaagagtgtagttaattataaagttttgatttatttttagtttgtttttttttttttagagaatgttttttaggttttttttttttttagaagtttttaatatttattttatttttttaaattggggatcgaggatattgtagtttttttggtgtttttagggattagaatatagttttttttagttatggattaggtttttattgttgttgtaataaattattataaatttagttgtttaaataatacgaatgtatttttttatatttttgtaatgtcgttggtgggttagatttagattttgggttatataaaagaatttgagagtgagtttaaaataagattaggtaaaggagtttattgtaaagtgaaagtatattttgagaggtagagtgggttgtttaaagttagtttaaagttagaggtagtagttagtgttttaaggggaattttttttgtggaaattgtatatatatattaataaaatattggtgagattaagtaagtaaaggtagatttgtggttagtatatgagttatttggtttaatacgtattttatgtattattagcgtataaaatttttacgtggtggtgtgttttttgttattataatgaggaaaaggttattataagttaaattttgagtttagttgtgtatgtaagattttggagaattttttagttatatttttatttattttaattaaggtaggaatttgtagttaatagttttttgggtttttggtgttgattggttggagatgggtagttatattatgaataaagggttttcgtttttttttttaggttgtatagggtattaagaatttgtaattatttggtagaattttgtaggattgtttgttttgtaaaagattttagtgttgatgtaggagggtgtaagtgaaaagaatttattgtaaaaggagtcgtggggttttatatatgggataagttagtatggttttttaattttatttattttgttttagtaggttagaggtttgaaataagttttaatgggttaaaattaagttgttagtgtggttgtatttttttttgaaggttttaggggaaaatttgttttttgtttattttggttgtttgtagaatttaattttttgtagttggaggattaggtttttgtttttttattggttttaaatagagttgttaatagtttaaagggttgtagaattttttggtttatagttttttttttttgtatttaaatttaataatagttggttatgtttattttatgttttatttttttgagttatattttgtttttttttttttttatttttattaaagattggtgtgattagattggattttatacggtttaataatttttttttttataaagttaattgattagtaattttaatttttttttgtcgtataatataatatagttaggttttagggattaggatatggatattttggggatagggatatttttttgttttttataagttatatgggatatattgaatttttaatatgtgttaggtgttattataggttttggtgatatagtaatgaattaaataaaggttttaatttttatgagtttatgttttagtgaaattttatatgtaatattatgaatgtatttttttgtttattttttagtatattttaaaaatagttttattgagtttaattgatatttaataaattgtatatatttatgttttttatgtttttttaagatgtggaataaaaaaatagtatatatatttttgtatttgtttggtaaaaatttttaaagttttgtttaattttatttaggttgttgaataaaatttatattagtaataaatattagggaatgaaaataatgtatttttgttgataaagtaatagattttgtttggttgtttttggagtcgttatgttttgtgtgtgtttttgtttttagatttttttttttttttttttaatttttattttaggtttaggggtatatatgtaggtttgttatatgaataaattgtgtgttataggcgtttgttgtatagattattttattatttaggtaataagcgtagtatttgatgggtagttttttgatttttattttttttttattttttatttttaaatagattttaatgtttattgttttttttttggtgtttttgtatatttaatgtttagtttttatttataagtgagaatatgtgatgtttggttttttgtttttatattaatttatttaggataatggttttttagttttatttatattgttgtaaaggatacgattttatttttttttatggttgtatagtattttatggtgtatatgtattatattttttttatttagtttatagttgatgggtagttaagttggttttacgtttttattatcgtaattagtaaattgtatgtatttaaagtatataatttgatgagttttgatataggaatttatttgtgaaattattattataattaaaataatgaatatatttgttattttttatagtttttttttgtttttttgaatttaatttattttataatttatttttaggtaaatattggtttgttttttgttattataggttggtttttttttttagaattttatataaatgaatttataatatgtattttatttttgtttagatttttttatttagtataattattttgtgattaatttatgttgttgagtgtataaatagtttatttttttttattgttatatagtagtttattgtatggatgtattataatgtgtttatttatttaaatgttgatggaaatttagattgtttttagtgttgtttgttttttgttgtatttagtaaaatattataagaaagtgtaaatttaggtaagaaatgattagattgtaagtagagattgaaggaaatagagtttagagatgtgagtttttataagattgagaaatgtttttatattttagataataggaaatatggttttagttgtttgtgttaggttaaataatgattgtttttttattaaaatgtttatattttagtttttagaatttgtgaatatgttatcgtatatggtaaaagggattttgtaaatgtaattaaggattttgagatgaggagattattttgaattattttagtgggtttaatttaattatatgagttattaaaagtagaagattttttttagttgtagtaagagagagatatgtgatgatgggataaagggttagagagatgtgttatattgttgattttgaaggtggagaaatagggttataagttaaagaatgttagtaatttttagaagttgaaaaaggtaagaatatagattttttttgtgagtttttagaagtaatgtggttttattgatattttgattttagtttagcgaaattagtgttggttttttgatttatagaattgtaagtttataaatttttattataaatatataatatatattatattattataaatttatatttatagattatatatttatatttaagtaattaagtttgtggtaatttgttaaattagtgataaaaaattaatatttttttttaagttttttttaaaggttttgtattaaggtaaatagaaggatagacgtttaaggaaataattagattaaaggagttttttttttatttaaagttgttattattaaattaagagtgatatgagttatttaatagagtttagaataaaagattttagaattagatttagaaaagaattttggttgtggttattgatgtatgaaataaataaataagaagtttttttagtttttgaagaaattatatttttaaggaagttataaagtttaatataaaaaagtttgtggttaagtttaaaataatttataggtttttaaattgtaattatagaagttaggttgtaaaatttgtacggggtaattttaagaaatgagtattttttatttttttttatattggttatggtagataatggagaagaaagaattttttagaaagtaaagttagtggttaggatgataaataaaggagttttttttatagagaggattagtgatagttagatggattaagtttggaatttattttattgagagggtaaggataatttaggatttttatttagtaagatttaattattgttgtgggttaatgattgtgtgtttttgttttttaaataagagttttttttgttattattttgtttttattttattattgtatattatttgtgtttacgtggtagagagtgataatttagattttattattttatgggttattgggttatgaggatttaagtgtatatttaatagaaaattgtatgttatttaaagattttggattttgagttggatgttataattggatgagatatttttttagggggtgaggtgagttttttttaaatgtgaaaagtagagtatatgtggattattggtgattattgttggtttgtgtaatgatttttaattgattataaaatttatttttttttttttaaataaataaagtatagttgagatttggtcggattatattttttagttttttttgtagttagatgtagttatgtgattagggttttgataaaggaatataagttgtgataaatgaaatagttattttatagattaaagagattttgaattttagttttttttgaaattttttattattggttgaagtaaattgattttgtaattatatgttgaagatagaagaatttttaatagtatgtatttttaagtgattttatagagtataattatttattattttgataaatttatttaggattgttgagatggaaataaattattttgtttgagttattttatttatagttttttttattattatagttttgttttttattttaatatgtagaataaaatagttataggaagaagtaaatagtttttatgtatttaaattaatatttaggtagaagatataatagaagaaaagatattatttataatattaataaaaagataaaatattttggaatgaatttattttgaaatgtgtgatatttatatgtaataaatatttaaatattttaaaaatttgaaatatttttcgaatatatatattgattattataaagttattattttttcgggttaattttaatttaatttgtaaaaaataaaaatattagaggtgtttttttttttttttgagatagagttttatttttgttgtttaggttggagagtaacggtataattttagtttattgtaatttttgtttttcgggtttaagcgatttttttgttttagttttttgagtagttgcgattataggtatatattattattttagttattttttgtattttagtagagatggggttttattatgttgattaagttggtttcgaatttatgattttaggtgattttttttttttagttttttaaagtgttgggattataggcgtgagttatcgtgtttagttaggtgttttttttaattagataaattgatttaaagatttatatgaaaaataaagaaagaatattaattaaattttagataaggggagtttgagaaaaattggttttgttaaatatgaaaatattttaaagttttaataacgaaaagaatgtgatgttggtatataaatagatagattaatgaaaaataaaaggaaatttagaaatagatttaagtatatagtaatttagtggatgataaaaatgggattttagattagtggaaaagatagatgattatttaataaatgtttttgagataattggataattatatgggaaataatatttaaagttgggtataattttaattgtatagtatgataaattttaaatgggttaaagtttttaatgaaaaaaaggaaatatttttttttaattttggaggagggttatttaattgtaattttaaatcgtaaaagttataggatagaaaattaataaattgaattatataaaataaaaagtagtttcgagtagtagaaaatattataaaaaattaaaagataaatgaaaaatttatagaaatatttttatgtatattatatttaaagaaatgatttttttagtaattaaaatgtattttaaaattgagaagaaagagattagtaatttttgaaagaaaaagtaaaaagaattttaatagataattgttgttgaaattttgtttgttgaaattttttttttttttttttgtttcgggaattgtgaagaaatttagaaaaggaaataaaaatagttattaaatatatgaaaaaatatttaattttgtttttattagaggaagaagaaaaattataggagatattatgttttttttgttagattggtaaaaagttaaaagtttggtaatattttttgttgataaggttatggagaaataagtattttgatttattggttataggagtttagtttgggataaattttttggaggataattaggtaattaatattttttaaaattgtttgtgaatatagttttaaattttttaattttattttttgaaatttattttatagatataattatatatatgtaaaaatattatgtataagtttatttaatattgtttgttttaataaaagattggaaaaatttatgtatttattaatttgagattaattaaatatttatatatatacgaataatggaatattatgtaatgaaaatttaattataatataggaggtttttgtgtgtttttggtaagatttttaagatatattgtgaagtgagagaatgaggtgaagaacgttgtataataggttatttttgtgttaaaaaaagagggaatgaagagttattattatattattatgaaaaaattggaagatatataggtaattaataaaagagattatttttttggggtaaggtgtaaattggatagattgtggataggattttgagtgagattttttattgtttagttttttttgtattagtaagtgttttttaaagtaaatggataagtagaggaatggtgttagtataatgtggaagttgtattgtgtaatatataattttttttatatgttaatgttttgtattgagtaatagtagttgtattaaaatagtagttaagttttaaatacgatttaagggagtaagttatgaatataatgttgtgtataatgtcgttgattttttttttattttatttattttggttatattttttattttgaagtgtttattaagtagtttttttaatttttatgtattttttttgaattattttgagaatgggaatattaagatgttgttatagttttataataatttgttgttgagatgttttttaagagtggggaagaaaaatttattagattttagaataattttataagagttttttttttttattttaggtgtgattgatatgtatttgtagatgtgttagtgtagattgtattttatggtataaggttttatttggagttataatagtagttttttaatgaaagaaggaaggtggtaatatagaaaaaaaaaaattaggtgtttttttttaagtaggtgtaaaataaataagtagaaaataattatttagagttatttatttttgttatttatattttgtgtaaagttttaattgtttattttttatagttttttatggtgatgtttttttattttgtttttataaagtagtagtttttatttttttttatttttttgtatttttagttttttttttatttattttattttatttttttatttttttaattgttattttttttgagatggaggttcgttttgtcgtttaggttggagtgtagtcgtgtaatttcggtttattttaattttcgtttttcgggtttaagttatttttttgttttagttttttgggtagttgggattataggtacgtgttattatgtttggttaattttttgtatttttagtagagacggggttttattattttaggtaggatggttttgattttttgatatcgtgatttatttatttcggttttttaaagtgttgggattataggtatgagatattgtatttggtttttttttttaaattttttttgagatggagttttgttttgttattaggttggagtgtagtggtgagatttcggtttattgtaatttttgttttttaggtttaagcgatttttttgttttagtttttcgagtagttgggattatcggcgcgtattattatgtttagttaatttttgtatttttagtagagatgggggttttattattttggttaggatggtttcgatttttggatatagtgatttgtttatttcggttttttaaagtgttgggattataggtatgagttattttttagtttagttttttttttaaaaagttttttatttatttagagtttaataagttttttttttttttttttaaaaattatgttagtatttttattcgaattgttattgttttgttagtgttatgagtatgaagatgaatagattttgagttgtttattaaaattttgttttttttataaatattgttgtttttttgtgaatatttttatatgaatttaaggatttgtttttttatatttgtttaaaaggttgttgaaattttgatagagattaattgagtttgtagattattttggatattattgataatttaataattttaagtttttttatttattaatataagtatgtttttttatttatttagatttttaattttagtaattttttatagtttttagtgtatatttttatttgagcgtatatttttatttttttttttttttttcggtttttggtaatcgttatttttttttttttttttatgagattagtttttgtagttttatatatgagtgaaattatgtgttatttgttttttattgtttggtttatttaatataatgtttttttggtttatttatgttgttataaatgatagaattttattttttttatggttgaaaagtattttattgtgtatatacgttatattttttaaaatttatttattttttgatggttattttggttaattttatattttggttattgtgaatagcgttgtagtgaatatgggagtgtatgtatttttttgacgtattaattttattttttttggatatatatttattagtgagattgatggatgatatagtagttttatttttaattttttgagaagtttttttattgttgtttgtaatggtttggataatggggtggttattggtacgtgtttttgaggaataggaagaatgagagagatagtggatttggatgtgtgagtttaaggtgtaagatttaagtggtggtttagtaggttttggtagttttttagagtttgtatttgtaggtagaggttattgttagtgataaagttgtggtttgatttgttttttaaaatgtaggtgatatttattgttatgaaattaattttgtaggttataattagtatttttaaaacggattgtaatttaaaaattagaatatattataaataataaagaaaaatggtatttaataaaatgtgtgtgtgtgtgtgtttgtgtgtgtatatgtatgtatattagattgggatatgagtgatttttttattgtgatgttttaaaatatgtttgaaaaaaattagtttaaattatgatgaagagattttttaggtagtgtatgaataatagatttgtggatgaatttagtgtattttttttttttttttttttttgtgacggagtttggttttgtcgtttaggttggagtgtagtggtataatttcggtttattgtaagttcgtttttcgggtttacgttatttttttgttttagtttttcgattatttgggattataggcgttcgttattacgttcggttaatttttgtatttttagtagagacggggttttatcgtgttagttaggatggtttcgattttttgattttgtgattcgttcgttttggttttttaaagtgttgggattataggcgtgagttatcgcgttcggttaaaatttagtggtttttaatatgtagtttttatgtttttagatgagttttaagatataggtttaaattttgttagtttttattttttatttttgaattatttataggaaatatattttattgagttgatttattgagaggtgggtataaattttttagattttattgaaaaattagttgtttaaaattttttaggatatttttatttaattatatatatgaggtcgggcgcggtggtttatatcggtaattttagtattttgggaggttaaggcgggtagattacgagattaggagatcgaaattattttggttaatacggtgaaatttcgtttttatttaaaatataataaattagtcggataaggtggtcggcgtttgtagttttatttatttgggaggttgaggaaggagaatggcgtgaattcgggaggtggagtttgtagtgagtcgagatagtgttattgtattttagtttgggcgatagaacgagatttcgtttcggggaaaaaaaaattatatatatgagtattttttgaaatgtttatagtagagttagttgtttaaaattaatatttatttaatattgtaagttagaacgtgttttgagtagtgttttggaagggattttggattttgagaaaaaaggttgggagtagtttgaatataaaaattatttttttatgggttttattttgatgtttattaaatttataatttttttgttttttttatgtttttttagaaagtgattttttattttgaaagtgaattttttgtaggatttgagtatagtgattataattgttgttttttttttgagaaatttggaggatgaggttttttatttgttttgattatttgagagatttagtgattattgattgtggttatgttttttgttattattgtattatttaggtttgtgaatttattaggtaattattatattgttttttgtgtaagttagtttttaagaaaaaatatttgttatgtgtggtagatggttaatttgatggagaatatttggagaatgaaggtagatgaggagagataatttagagaggaaagattatttgagtaaaaagtagagaagttgtgtaggcgatatttggagaagttttattaatgttttaaaggatgattagtagatggtgtatgtgatgcgttggagtttcgagaatataagtattatgttgttgtttttttagaaaaggttgtatagtttcgtcgggtaagaatcgtgttggattttagttttgtttttttagttagaaagttttatggtatttttaggataaggtgtaggttttttgtattattttattgaggtatgattgatatgtaaaagttatatatatttaatgtatattaattaatgagtttgtagatgagtatatatttttgaaattattattatagtaaaaatacgtttattattttttaaattttttatatattttttttattgttattattttgtgtgtgtgataagaatatttagttaaagatttatttttttagtaaatttgaagtatataatatagtgtttttagttataggtattatgttatatagtaggtttttagaatttttttattttgtataattgaaattttgtaattttgattattaattttttatttttcgtttttattagtttttggtaattattattttattttgtttatgtaagtttgattgttttagattttatatataagtgaggtcgtatagtatgtgtttggtatatttatttagtataatgtttttaaggtttatttatgttgttattaatggtagaatttttttttttttaaggttgaataatattgtattgtatgtatatattatattttttttatttatttattagtgaatatttagggttttttaaattttggttattgtgaatagtgttgtaaagaatatgggaagtatatgggttataaatatttagaagtgaaattgttggattatatggtagttttgtttttaattatttgaggagttttttattgtttttataatggttgtattagtttgtatttttattaatagcgtattagggtttttttttttttatatttttattaacgttttttattttttaaaaaaatataatagtatttttaagaggtgtaagatagtttaaattttttagtatgaaagatttttggtaaagtattattttttgtatttggataataaagttggtttggttttatattttttatggaagtaagtatattatattgttttgatggttttatttttgaggtttagattaagttttattagttatatagaatattagtatttttgatagttttcgtagtatatagttttaagtggtatgtatatagttgttataaaaatatttttgaggtttggtgcggtggtttacgtttgtaattttagtatttttggaggtcgaggcgggcggattatagggttaggagatcgagattattttggtatatatagtgaaattttgtttttattaaaaatataaaaaattagtcgggcgtggtggcgggcgtttgtagttttagttattcgggaggttgaggtaggagaatggcgtgaattcgggaggcggagtttgtagtgagtcgagatcgcgttattgtattttagtttgggcgatagagcgagattttattttaaaaaaaaaaaaattttttttttataatattttagtttgtataaaatttatgtaattttttttttagaatttaataaggaaaatattattttttttggggttttagtatgtttttttttgtttgttaaagaaatattaggttaggtttggtggtttatatttgtaattttagcgttttgggaggttaaggtaggtgaattatttgatgttagggatttaagattagtttggttaatatggtaaaattttatttttattaaaatttaaaaattagttaggtatggtggtatgtatttgtaattttagttatttgggaggttgaggtaagagaatcgtttgaatttaggaagcggagtttgtagtgagttaagattgtgttattgtattttagtttgggtagtagtgtgagattttgttttaaaaaaaaaaaaaaagaaaaagaaaagaaaaaagaaatattaggtagtttattgttttttttttttttttgtttgttaatttagttatttttttaataatttggagttgttgttaggtgtggtggtttatgtttgtaattttaatattttgggaagttaaggtaggaggatagtttgagaataggagattagtttgggttatagtaagattttatttttataataataataataatagttattattattattatttggagttggtatatatattttttttgattttttgtgttaattttttgtttttatttttttttttttttataagatagggttttattatgttgttaaggtatgtttttaaagatttgggtttaagagatattttatttttatttttttaaatagttgggattataggtatatattattgtatttattttttatttttgttttattaattttaattttaattgtttgtatttttggtagaaaaggatagtataaatataaattagaaattatattataagttttgttagttataatgataatacgatattattttgttttatttttaagaaattgttttaggttattgtattatttaatggattttttttattaattagaatggaaattgttttatataattattattaaattatatatggttaaatgtagttggattttattttggaattattttgtatttttttttttttattgaggttatttttattttgattttgagattatttaagtttattttttttttttttttttttttttttttttttttgagatagagttttgtttttgttgtttaggttggagtgtagtggcgcgatttcgatttattgtaattttcgtttttaaggtttaattgatttttttgttttagttttttaagtagttggaattataggtgtttattattatgtttagttaatttttgtattttttagtagagatagggttttattatgttggttaggttggtttttaatttttgattttaggtaatttatttgtttcgattttttaaagtattgggattataggtatgagttattacgtttagttcgagattatttttgtttatttttatagggtaaaattttaaattatcggaagattttgaagggatatagggatagtatttagaatttttaatttatgggagaagatgagatttaggttttggtggtaagagaggtttttagtaaatgttttgtatgaatgtgtgtatgtgtgtagggtaggggtgtgtgtgtaggtagtagcggggtataggttaaggagaggaaggggtatgtgtgtgggggaagtattgaggaatggggagggggagagtgattaaagagatttttgttttgaatttatttttagaagattttatatatgttttggtgttttttagttttttaaaaaggttatttttttttttttgtatttattggagataatattttagaattataggtaagatattgtattagtgtttgaatagggttatcggtttttgagagaaagggaatagtatttgttggagtagttggtagggttagagtaagagtttattaaaaggaggaatagtcgtgttattaagggttttgaggaggtggtttagtttgggattttgattattgagttggagaagtttcggtagttagtatttgaatttttgaaggtaaaggattaattaaattgtatttgagtttttttgttttatgattacggtgtggtttatttgtaagagatttggattaagagttaagagagataaggtgttatttttatttattgaattttttaataattgaattagttaattaataggttttaagttttaaagtgtagtgggtaggggtttataatatgtatagattatataatggaatattaagatttgtatatttataattataataaataatttgatgttaaattttttagttagattggatgttataagaattttggaaatagttagtgtttagttagagaagtttttaaagaagaggtttttgatgttggttttgaaggaaacgtaaagatttattttattttatatttatttatttatttgagatggtatttttttttgttatttaggttggagtgtagtggcgcgattttaatttattgtaatttttattttttgggtttaagtgatttttttgttttagttttttgagtagttgggaatataggtatttattattacgtttagttaagtaagatttagattgttagaaaggagttaaatattttatttggtagggggtggggatatattagttataattagataaatgaatgtaataataaatttggtatatgtgttggtaggtgggtataggtgttggggaagataggagtaggaagattgataagaaggggatatagaatgaaggtagttatttttttggaagagttagattaagtgagggagaagtgaaaagtatgatggggttaattgagttgaggttttttaaagtaggttgaaatttgagttttaattgaatagataatgggatttttaatagatttttatttgtttataaattaagaaaggtttttgaagaggatagtttagaattcgaatgaaagatatgaaggggaagtatttgtttttataaattgaaattgtaggtcgggtatagtggtttatatttgtaattttagtattttgggaggttaaggtaggtagattatgaggttaggagatcgagattattttggttaatatagtgaaatcgcgtttttattaaaaaatataaaaatgaagtcgggtgtggtggtgggtgtttgtagttttagttatttcggaggttgagttaggagaatggcgtgaattcgggaggcggagtttgtagtgagtcgagattgtgttattgtattttagtttgggcgatagagttagattttattttaaaaaaaaaagaaagaaattgtaggttgggagtagtggtttatgtttataattttagtattgtgggaggttgaggtaggtagataacgaggttaggagttcgagattattttggttaatatagtgaaattttatttttattaaaaatataaaaattagtcggatatggtggtaggtgtttgtaattttagttattttggaggttgaggtaggagaatcgtttgaattcgggagatagaggttgtagtgagttaagattatattattgtattttagtttgggtgatagagtgagattttattttaaatgaaaaaaaaataaaaaataaataaaaaaataaaaaaaaaaataagaaaagaaaagaaaaaaagaaattgtagtagagggaggataggttcgggtttattagaataattttttgtttagttttggtgtatatttattttttaatgattttatagtagagaatgatgatggtttttgagaattatttttatgatagtgtttgtgttttgtttttttttaggatttaagtgatataatatgtaggtaagtgttgtttgtttttttttttttaaattttaattatttatgtttttttattgttttttttgtttattattttattgaaatttgataagtgttggaaagggattgtttagaagggagagaggttattttggttagtgtatgttgaaaggtattttatggaatagaggagggagttttagaaaaaaatattgttatggaatttacgatggtaatgggttgagaaaaataaaatgagaggagattatagaaaagtattggagaaaatttagaatttatgtttatttttaaaattagtttttttttattttttttttttttatatggtttttagtttttatttttggttatagttttttttatattttgtagagtatattttattattagattgttttttgtttgatagtgaggttttttgtattttggttgtttatagaaagtaaatatttttatggtttatagggataatgattttttttttatgttttttatttgagttttagattgtttttcgtaggatattttttagtagtgggtttgaggaatatgttaaatatttaatattgatagtttttaaaattatatttatatgatatagagaagttttgaatagagaataaagttaggtattttgataatatataatttatttgtagagatatttaggattattggtatatattgagtattttttgtgggtaaaatattgggtagaaaggcgtgtgatgagataggttattagattatggttggggatattagatagatatatatgagagatgaataatgatataaaaaatgaggttgatatagaatgggtaatattttttgttttgaagtgttttgttcgttttagtaaaattattttagttttatattgattagtgtttatatggtatttttttttttgttttttaatttttaaattttttgtgttttttaaaaatgttttttataagtaatataaattttgttttgttttttaataaatttattttgataatatgtaatggaatatttagtatttatttatggaaaattattattttatttatatttttaaaataatttgtatagttgattaagataatgtgtttagatttattaatttttttttttatatttgaatgtttttattttttattttgtgtatttttattttttttttttttttttgagttggagtttcgtattgttgttttggttagagtgtaatggtataattttggtttattgtaattttcgttttttgggtttaagagatttttttgttttagttttttaagtagttgggattataggtgttcgtcgttatgtttagttaattattttttgtatttttagtagaaatggggttttattatgttggttaggttggtttcgaatttttgattttgtgatttgttcgttttagttttttaaagtgttgggattataggtatgagttattacgttcgttttttttttttttttttttttttttttttttttttttttttttttaagagataagggtttttttatgttgtttaggtcggatttttgggtttttgggtttaagcgatttttttattttagatttttaagtatttgggaatataggtatatattgttatatttagttgtgtagttttattttattttttttatttgtttgtttttttttttttttttatttttatggattgttgagttttgtttttataaagtattttaatttttagtatatggtatttttattattgttttttagatattttgaaattttgaatttgattttttatttaatataagatttgtttaagaaagaagttatttgttagtgatatgttgagtttttttttaataggtttttttgttttatagtttttaagttttgtgataagaaaagtttgttatgtttattttttggattttttttgaggttttttaggttatatgttgtaaatttttggatagttttagatatttgaaaagaaggtgtatttttttttggaatagaataggattttgtatatttttgtaaggttggttttagtaattttgttatttaggtattttgtattaatatttattttttgattttttgatatgttatggattaaaagaggttagttatagatttttattaatagtgagtttttgtttatttttttttttttttttgagatggagttttgttttgttgtttaggttggagtgtagcggtacgattttggtttattgtaatatttatttttcgggtttaagtgatttttttgttttagttttttaagtagttgggattataggtgtgtattattatatttagttaatttttgtatttttagtagagatagggttttattatgttggttaggttggtttcgaatttttgacgtgatttgttcgttttagttttttaaagtgttgggattataggtttgagttatcgtgtttagtttatttttttttatattgatatagtttttgttttttatattttgatgttttttttttatatgatttttaaggaaagttgtattttaattgtgaattataattttgttttaaaaaatagagatagagttttaaaaaatcgagattcgtttagttatttagattagatgtaatggtgtaattatagtttattataattttgaatttttgggtttaagttattttttcgttttagttttttaagtagttgggattataggtgtatgttattatatttggttaatattaaaataattgttttagaggggtttttattgttatttagtttgattttgaatttttggttttaagtgatttttttgttttggatttttaaagtattgggattataggtataagttatagtatttcgtttataatttttaagtaataaaaaatgttgttgttttatttaatattttttttttttaaatttaattttgttcgatagtaagattaagatattagaatttttttattttggatttagttaatatatttttgtttattattattttaattttaaatttaaaaaaaatgtaaagttttattttaattttttttttttaatttaatttttaaaatatattttaaggtatataatatgatgttgtgagtaaaatggttattatagtgaagtaaattaatatttttattattttatatagttatttgtttttttttttatttttaattttttattgtaagagtagttataatttatttatttagtaaaaattttgaatataatatattatttttattatttttttaatttatttttttgagataaggttttattttgttatttaggttggagtgtagtggcgcgattttggtttattgtaatttttattttttaggtttaagagatttttttatttgagttttgcgagtagttgggattataggtacgggtattatatttggttaatttttgtagagatagggttttattatgttgtttaggttggtttcgaattttttggttttaagtgatttgtttatttcggttttttaaagtgttgggataataggcgtgagtcgttatgtttggtttataatgttttgatattagttatagttggtaggttgggtattagatttttagatttgtttattttatatattttttattttgtattttttgaggtatatttttttattttttttatttattttatttttggtaattattattttattttttatttttgtatatttgattttttaaaaaattttatatatatgtaaaataatgtaatagtttttattttgtatttggtaagttttattttaatttttatttaatttgatatatatttttaaataatttttttagaggttgtaatagcgaggaaggagttaagatggtcgaataggaatagtttcggtttatagtttttagcgtgagtaatgtagaagatgggtgatttttgtattttcgtttgagttttgaagagagtagtggtttttttagtacgtagttggagatttgagaacgggtagattgtttttttaagtgggtttttgatttttgatttttaagtagtttaattgggaggtattatttagtaggggtagattgaaattttatacggtcgggtattttaatagatttgtagttgagggttttgtttgttagaaggaaaattaataaatagaaaggatatttatattaaaaatttatttgtatattattattattaaagattaaaagtagataaaattataaagatggggaaaaaatagagtagaaaaattggaaaatttaaaaagtagagcgtttttttttttttaaaggaatgtagttttttattagtaacggaataaatttggacggagaatgattttgacgagttgagagaagaaggttttagacgattaaattatttcgaattatgggaggatatttaaacgaaaggtaaagaagttgaaaatttcgaaaaaaatttagaagaatgtataattagaataattaatatagagaagtgtttaaaggagttgatggagttgaaaattaaggttcgagaattacgtgaagaatgtagaagttttaggagtcgatgcgattaattggaagaaagggtattagcgatggaagatgaaatgaatgaaatgaagcgagaagggaagtttagagaaaaaagaataaaaagaaacgagtaaagtttttaagaaatatgggattatgtgaaaagattaaatttacgtttgattggtgtatttgaaagtgacggggagaatggaaataagttggaaaatattttgtaggatattatttaggagaatttttttagtttagtaaggtaggttaatatttagattgaggaaatatagagaacgttataaagatatttttcgagaagagtaattttaagatatataattgttagatttattaaagttgaaatgaaggaaaaaatgttaagggtagttagagagaaaggtcgggttatttttaaagggaagtcgattagattaatagcggatttttcggtagaaattttataagttagaagagggtgggggttaatatttaatatttttaaagaaaagaatttttaatttagaattttatatttagttaaattaagttttataagtgaaggagaaataaaattttttagagataagtaaacgttgagagattttgttattattaggtttgttttaaaagagtttttgaaggaagtattaaatatggaaaggaataattagtattagtcgttgtaaaattatgttaaaatgtaaagattatcgagattaggaagaaattgtattaattaacgagtaaaataattagttaatattataatgataggattaaatttatatataataatattaattttaaatgtaaatggattaaatgttttaattaaaagatatagattggtaaattggattaagagttaagatttattagtatgttgtatttaggaaatttattttacgggtagagatatatataggtttaaaataaaaggatggaggaagatttattaagttaatggaaaataaaaaaaggtaggggttgtaattttagtttttgataaaatagattttaaattaataaagattaaaagagataaagaaggttattatataatggtaaagggattaatttaataagaagagttaattattttaaatatatatgaatttaatataggagtatttagatttataaagtaagttttgagtgatttataaagagatttagatttttatatattaataatgggagattttaatattttattgttaatattagatagattaataagatagaaagttaataaggatatttaggaattgaatttagttttgtattaagcggatttaatagatatttatagaattttttattttaaattaatagaatatatattttttttagtattatattatatttattttaaaattgattatatagttggaagtaaagtttttttagtaaatgtaaaagaatagaaattataataaattattttttagattatagtgtaattaaattagaatttaggattaagaattttatttagaattatttaattatatggaaattgaataatttgtttttgaatgattatttggtatataacgaaatgaaggtagaaataaagatgttttttgaaattaataagaataaagatataatatattagaatttttgggatatatttaaagtagtgtgtagagggaaatttatagtattaaatgtttataagagaaagtaggaaagatttaaaattgatattttaatattataattaaaggaattagaaaagtaagagtaaatatatttaaaagttagtagaaggtaagaaataattaaaattagagtagaattgaaggaaatagagatataaaaaaattttttaaaaaattaatgaatttaggagttggttttttgaaaggattaataaaattgatagatcgttagtaagattaataaagaaaaaaagagagaagaattaaatagacgtaataaaaaatgataaaggggatattattatcgattttatagaaatataaattagtattagagaatattataaatatttttacgtaaataaattagaaaatttagaagaaatggataaatttttggatatatatattgttttaagattaaattaggaagaagttgaatttttgaatagattaataataggatttgaaattgtggtaataattaatagtttattaattaaaagagtttaggattagatggatttatagtcgaattttattagaggtataaggaggaattggtattattttttttgaaattattttaattaatagaaaaagagggaattttttttaatttattttatgaggttagtattattttgatattaaagtttggtagagatataataaaaaaaagaattttagattaatatttttgatgaatatcgatataaaaatttttaataaaatattggtaaatcgaatttagtagtatattaaaaagtttatttattatgattaggtgggttttatttttgggatgtaaggttggtttaatatacgcgaattaataaatataatttagtatataaatagaattaaagataaaaattatatgattattttaatagatgtagaaaaggtttttgataaaatttaatagttttttatgttaaaaatttttaataaattaggtattgatgggacgtattttaaaataataagagttatttatgataaattcgtagttaatattatattgaatgggtaaaaattggaagtattttttttgaaaacgggtataagatagggatgtttttttttattatttttatttaatatagtgttggaagttttggttagggtaattaggtaggagaaggaaataaagggtatttaattaggaaaagaggaagttagattgtttttgtttgtagatggtatgattgtatatttagaaaatttcgttgttttagtttaaaatttttttaagttgttaagtaatttcggtaaagttttaggatataaaattaatgtgtaaaaattataagtatttttatatattaataaaagatagagagttaaattatgagtgaatttatttataattgttttaaagagaaaaaaatatttaggaatttaatttataagggatgtgaaggatttttttaaggagaattataaattattgtttaacgaaataaaaaaggatataaataaatggaagaatattttatgtttatgggtaggaagaattaatatcgtgaaaatggttatattgtttaagttaatttatagatttaatgttatttttattaagttattaatgattttttttatagaattggaaaaaattattttaaagtttatatggaattaaaaaagagtttgtatcgttaagttaattttaagttaaaagaataaagttggaggtattacgttatttgattttaaattatgttataaggttatagtaattaaaatagtattgtattggtattaaaatagagatatagattaatggaatagaattgagtttttagaaataatattatatatttataattatttgatttttgataaatttgataaaaataagaaatgaggaaaggattttttatttaataaatggtgttgggaaaattggttagttatatgtagaaagttgaaattggattttttttttatattttatataaaaattaatttaagacggattaaagatttaaatgttagatttgaaattataaaaattttagaagaaaatttaggtaatattatttaggatattggtatgggtaaggattttatgattaaaatattaaaagtaatggtaataaaagttaaaattgataaatgggatttaattaaattgaagagtttttgtatagtaaaagaaattattattagagtgaataggtaatttatagaatgggagaaaatttttttaatttatttatttgataaagggttaatatttagaatttataaggaatttaaataaatttataagaaaaaataaataattttattaataaatgggtaaagatatgaataggtattttttaaaagaagatatttatgtagttaatagatatatgaaaatatgtttattattattggttattagagaaaaggaaattaaaattataatgagatattattttatattagttagaattatgattattaaaaagttaggaaataataggtgttggagaggatgtggagaaataggaatatttatattgttggtgggattgtaaattagtttaaatattgtggaagatagtgtggcgattttttagggatttagaattaggaatattatatgatttagttattttattattgggtatatatttaaaggattataagttatgttgttataaagatatatgtatacgtatgtttattgtggcgttatttataatagtaaagatttggaatcgatttaaatgtttattaatgatagattggattaagaaaatgtggtatatatatattatggaatattacgtagttataaaaaaggatgagtttatgttttttgtagggatatagatgaagttggaaattattatttttagtaaattattttaaggataaaaaattaaataacgtatggttttatttataggtgggaattgaataatgagaatatttggatataggaaggggaatattatatatcggggtttgttgtggggtggggggagggcggagggatagtattaggagatatattttatgtaaatgacgagttaatgtttgtagtatattaatatggtatatgtatatatatgtaataaatttgtatattgtgtatatgtattttagaatttaaagtataataaaaatatatagatattaaaaaaaataatttaaaaaaaagaaatttgtaataataagatgattttgtgggattgaatgtttttgttatttttaaatttataattgaaatttaatttttaatgtgatggtgtttggaggtggagttattaggaagtgattatgtaatgaaggtaaaatttttattaatgaaatgaatgtttttataaaagggattttagagagttttttgttttttttattatgtgaggatattaaggaaaagtaatatttatgaattaggaagtagtttttattatatatggattttttttaggttttgatttttgattttttagtttttagaattgtgagaaatagatttttgttgtttgtaagttatatagtttatggtatttttttataattgtttagattgattaagatagatgatgatgaaaatattattaagtattggaaattaatattaaaattttaaatgataatttatttaaagaggaaatttagagaaattagaaagttttttgtattttgaaggataatgaaatatatatattaaatgtatgggatgtagttgaagtagtattagagaaaaaattaatatttttaaatgtttatattaagaaagaaggtaggttttaaattagtaaattagtttttgttataagaaataaagaaaaataaattaaattaaagtatggagaaggaagaaaataataattaaatggaaaaaatgaagtagaaagatagagaaaattaatgaatttaaatattggttttacggggaaaaattagtatattttataaatttttagttagattgattaagataaaaagatgtatattaataatgttaagaaaaaacgaatattagtgtatattttttagattttaaaaagaaatattgataattttatgttaataagtttgataagtaaatgaaatgaataatttttttgagagagaaaatttatgaaaattgatttgagaagagatagaaaatgtggttagttatatattgattgtagaaattgaatgtgtaattaaaattttttttatataggaaattttaggtttagaaggttttattgatgaaatgtatttaataaataatttggaaataatattaattttatatatattttttagaaattaaaggaggtaataatttttaatttaatttatgtagttagtttttatagttaggcgtgagtatttggtttttttaggtgtatagtgtaagttgttggttaatttattattttgagatttggagtatcgtggttttttttttatagttttattgggtagtgttttaataggaattttgtgtgggggttttagttttttattttttttttatattgttttagtagaggtttttcgtgagggttttgtttttgtagtaaatttttgtttgggtattttagtatttttatatattttttgaaatttaggtggaggtttttaaatttttatttttgatttttgtgtatttgtaggtttaaaattatgtggaagttgttaaggtttaaagtttgtattttttggagttatgggttaagttgtattaagtttggttttttttagtagtcgtgggagtagttgggatttagggtattaagtttttaagttgtatatagtatgggaattttgggtttggattaggagattattttttttttttgtgtttttgggtttgtgatgggaggggttgttatgaagatttatggtatgttttggagatattttttttattgttttgggggattaatatttggttttttgttatttacgtaaatttttgtagttagtttgagtttttttttaaaaaaattggtttttttttttattgtatcgttaggttgtaaattttttgaatttttattttttgttttttttttaaaatggaatgtttttaatagtatttaagttatattttaaatgttttgttgtttagaaattttatttgttagatattttaaattattttttttaagtttagagtgttatagatttttagggtaggggtaaaatgttattagtttttttgttaaaacgtaataagagttatttttgttttagtttttaataagttttttatttttatttgagattattttagtttggattttattgtttatattattattagtatttttgttaaaggtatttaataagtttttaggaggttttaaatttttttatatttttttgttttgttttgagttttttaaattgttttaatttttgtttaatatttagttttaaagttaattttatattttcgggtgtttttttagtagtatttattttattggtattaatttattgtattagtgcgtttttatgttgtttataaagaaatatttaagattgagatgaaaaagaggtttaattggatttagaattttatatggttggggaggttttagaattatggcgggaggtgaaaggtattttttatatggcggtaataagagaaaatgaggaagatgtaaaagtagaaatttttgataaaattattagattttatgagatttatttattattacgagaatagtatgggggaaattaattttatgatttaaattattttttattgggttttttgggttttttttataatatatgggaattatgggagtataatttaagataatatttgggtggggatatagagttaaattatattattagtattatttaaataaaaattttagataagaatattataagaaaaagaattaagaataaatattttttttgaatatagatttataatttaatataaaacgttatttaattaagatatatataaaatgaataatatgttatgttatattggtttttttaaagggaaagtaaggttggtttaatatttgaaaattaaataatataatttatttaattaatagaataaagaataaatgttgtataattattatagttaatgtagaaaaagtatttgtaaaattaagattattttatgataaaatagtttagtaaataaaatcgaaaggaatatttttaatgtggttaaggatatttacgaaaagtttatagttatttttatatttaattatgaaaggttagatgtttattttttaagattagtaataaagtaaagatgtggttttttttatttttgtttaaaatattttacgagtattttaattagtgtaatatggtaagaaaatgaaataaaagattaataaaagggttaagtgtggtgttttatgtttgtaattttagtattttgggaggttaaggtgggaggattattttagtttaagagtttgagattagtttgagtaatatagttagatttttgtttttattaaatataaataatttttaaaagaaaaaaaataatagataggaaaggaagaaataaaattttttttttttagtttaattatatatgtagaaaataataaggaattttgaaaaagtttttggaagtaataattaaatttgtaaaattgtttataaaagatatgtaataagttttttagataaatatgataagatagtaataatattagttattaaagaagtgtaagttaaaattataatgagaaattattatatattatttagaataagtaaagtttaaaagatatatgataattttaaatattggtatgaatatggaaaaaataaaaattttttatattgttggtaggaacgtaaaaaaaagttgtagttagtttgtaaaataatatggtaattttttaaatagttatttatttatttattatattatttaataattttataaatatttatttatttaaaggaaatgaaaatttaaggttatgtaaagatttgtagttagttatttatagtggttttattaattatagattttaatcggaaataatttacgtttattagttggagaatagagaaattaacgaataaattggaattttaataatatttagtagttatttagtgataaaaatgaatgaaatattattatttttaattatatggaaaaattttaaatattgttatgataagtgagagattaaaggattatataatatatgattgtatgtttatgaaattttagaaattttattattatagtaatagaaagtatagtagtggttgagtgaagagaagggggtgagggtgggaggtaaggattaaatagaaaaggggtataaggaaagtttttagggaaaagaaattgttttttatttgggtaatgtggtagttatatgattataaataattattaatatttataaaatattgtagttaaaattggtgagttttattatatataaacgttttaattaggaaaaaaaaaggtgggggaagaaggtaaaaatgaagatatttttatataatttaaattagaaaatttattttttagggattttgtattacgtataattttgaaggaagttttttaggttgaagggaaatgatattagatggtgatttagatatatagaaagggataattaataatagaaattatgtatatatatagattatatatatatttatttttttaatgataatatgaatgtttaaaataaaaagtattattgtattattgagtttataaagtatattgatgtaatatatataataagaatagtataatggtaggttatatgaaattatatttttataagtgttttttattttgttggatgtagtttaatattatttgaattttattatgaaaagttaaggaatcgggttttaatttttataataataaaaaattagtgtaaagaaatatatttaaaagttattagaattaaaattataaattaaaaaatgtttatttaatatataagaaagtaggaaaggaggaatagaaataaaaagatacgagataaattgaaaatatatagtaaaatggtagattaaaatttaattattgtaagtgaagaaatgatacgatttgagttatattagtagaattgttgagtattgtggggagaatagatatgggtaggaagtgagggatagtgttagtgttataatttaggggtgagagggtggtagggattaaggggaggggagggtgtgagggatgagaggggtagagagaagggttggagagataggaagtgaggaaaaggagtaagggaaaggattttaaagtagtggaggagtttagtagggggtttttgatatgtattcggtatttaatatattttgtgggattgttaaaaattaatggtttttttatgattaaaaatataagagtaaaaaaatattaagtatgtaaataaaatgtgtatattgtttagatgtgtataatttataaaaataagtagtgtttaagtattgatgataggtattttgattttagtgtaattttgaggttttttgttataatatatagtaataaattttgtttttttgtattgagatgttttggatttatatagggaaattcgggttatggaatgaagataattttaaatgtaataatttagagttatggatttatagtttgggaaagtaaatttagaagttttgtgattcgaattgtaatgttgtttggatatatttatatatgaagtaggtaaaattaggttttttatagattagaattttgattatttaggggttagattgtgttaattattgtattaataaataaataaataaaaaaatttggttattatgagaatttttattttgtgtttttagttataattttattaggtttaaagagaaaatttttttttttatatcgttatttttaaggcgagtttattttttggtattaaagttttttggggtgagtttttttttaggatagtttaaggggagaggtaaggagtcggaagtttagtttagggacgaggattttaggatgagcgtgaatgggaaggggttgggtttagtttgggggttttttttttagtttttatagatagatttttgattaggatttaggtagttagtgtgataaagaggttggcgtaggaaaagagaggttaggataaagttttaggttttaggcgtggttttttgggttttaggttttaagagcgatgattgtattggggagttatagggttggggattgtttatttttttgagttttggtttttttaattttttttttggatatttgtgatataattttattttttatttttattgggtgtcgggtttttagagaagttaattagtttcgtcgcgatttcggtattaagatttcggtattatagtttcggcgtaattattcgtatttagattttttttaaacgttaaggatgggggttatggtttttcgaattttttttttgttgtttttgggggttttggttttgatcgagatttgggtcggtgagtgcggggtcgggagggaaagggtttttgcggggagaagcgagtggttcgttcggttcggggagtcgcgtcgggaggagggtcgggcgggttttagttttttttcgtttttaggtttttattttttgaggtattttagtatcgtagtgttttagttcggtcgcggggagtttcggtttatcgtcgtgggttacgtggacgatatagagttcgtgcggttcgatagcgatttcgtgagttcgaggatggagcggcgggcgtcgtgggtggagtaggaggggttggagtattgggattaggagatacggaacgttaagggttacgcgtagatttatcgagtgaatttgcggattttgtttcgttattataattagagcgaggtcggtgagtgattttggttcggggcgtaggttacgatttttttttattttttacggatagtttaggtttcgggtttgagttttcggtttgagatttatttcgaggttgcgggatttgtttagattttcgattagggaagaaattcgggcgtttttattcggtttaattttagtttaggttaaaattttcgcgggttggtcggggcgggagcggggttcggtgttcggggttgacggcgggggcgaggttatggtttttatattatttagaggaagtatggttgcgacgtgggttcgataggcgtttttttcgtaggtatgaatagttcgtttacgatggtaaggattatatcgttttgaacgaggatttgtatttttggatcgtcgcgaatatagcggtttagattttttagtataagtgggaagcggataaatatttagagtaggttagggtttatttgagggtaagtgtatggagtggtttcgtagatatttggagaacgggaaggagacgttgtagtacgcgggtattaggggttacgggggcgttttttttattttttgtagatttttcgggttggttttttattaggagagtaggaaaatgggattaatgttagaatatcgtttttttattggttttgaatgggaagaattttgggtttttagattttgtattagagagtaattttgagagtttattttgttttttgggataattaagggatgaagtttttgaggaaatggaggagaagatagtttttggaatattgattcgtggttttttttgatttttgtagtagtttggggtattaggaattttttttttaggttttgtttttttttttatatttagtgtgttcgtggtttcgattttagtttttttgagtgttttggtttttatttaggttaggattagaagtttttgtttttttattagagattcgaattttttaaggaataggagattattttagatttttgtgtttaggttggtgtttgggttttgtgtttttttttttattttaggtgttttgtttatttttaggatggttatatgtatgttgttggagtgttttatgaggaatgtaaagtgtttgaattttttgatttttttttttagattttttaaaggtatatgtgatttagtattttatttttgattatgaggttattttgaggtgttgggttttgggtttttattttgcggagattatattgatttggtagtaggatggggaggattagatttaggatacggagtttgtggagattaggtttgtaggggacggaattttttagaagtgggtggttgtagtggtgtttttcggagaggagtagagatatatgtgttatgtgtagtatgaggggttgttagagttttttattttgagatggggtaaggaggggtgtaagttgtttttttttagggaaagtaggagatttttagtagggtagggttgaggtttgggggttagaattttttatttttttttttttttttagagtcgtttttttagtttattatttttatcgtgggtatcgttgttggtttgtttttttttggagttgtggttattggagttgtggttgttgttgcgatgtggaggaagaaaagtttaggtagggaaggggtgagaggtggggtttgggtttttttgttttattgtgggttttaagttataggtagaattgtgatttgttttattattgggaagtatcgtcgatatataggtcgatttagtttggggttttgtgtgttaatatttgtttttttgtgaagtatatgtgaaaacgaaggataaatttattattttgatgattgtggtgatggggattttttagtagttataggttataagggaagatttttattgaggatagattttaggagggtagttggtttagttattatatttgttttttttatgttttttgattttgttttgggtttgtagttatagttttggaaatttttttggggtttaggatttgttgtttttttaaggattttatgttttatgttttttttgattttttataggttgttttttttttatagatagaataaggaggagttatgttcgggttgtttgttagtatgggggattagagggttgttttttgagatcgttgggatagtgtagataagattttttttttagttatattttttgtgggttttgattagtttttatttttgttttattttaggtagtaattgtgtttagtattttgatgtattttatgatatttgtaaaggtgagatatgggggggtttgaagtgggtgggggtgaggtagaggggatatgattttgttgaggggttttttggatttagatattttgattatgtggtaggttgtttagagtgttattaggtatagtgattgttttggatttgtttatgattatttttttttgtagtttgagataattgttttgagtgggattgagagatataaaatttttttaggttttttttttgatatatattattgtaattttaagagtttttgatttttatatttgtatttgatacgtgaatatatttatgtgtttgtgttttagttagtataatgtgaggaaatgggttattggtttattattgttattaggattattattttatattaatttgttttttttttttcggttaagtttttttttaatagaggtgaggttgggatatttttatttatgttttaatttttaagttttattgagttgttatttattttattatttaaaataagaatttggatatgaattttttaaatttttgttatgaggttgggttgattgtttaatgaaaggagagtaagatttttaaaatttgagagaggaagtaaaatttgagagttttttagaatttatttttgttgtgttgggtttgttgtaggtggagataggagagagagggttgtgaggagttgagtgtggatagtttatgtttagtttattatggaatttgacgtggttatttattgggttggttatttttattgttttattgtttgtgtttttttagtagaattttgttttattaggatttgtgattataggtatataaatattgtttgggttttgttttgtttttaggatcgtggatagtaagggttttatgggttgggttagtttatggtttggttttaatattttgtattattatttttggtttttttgtttttgtagaggattatgtttgtttttgttttggtgtttgcgttttgattttttttttttttgggtgttttttatttttgatagtagtaggagttattttttttgttattaattttataaggtggaaggtagtttttgtatatagaagtttgtggtattaagagatgaatttttaagttcgtgtagtttttattttatttttagggtttttttttggattgtattttttattttttttttaatttttttaaaggaattagattttgaaattagtagagaagagggatgttataagtttttattttaggtaattttttagtggaattttttttttgtttagtttttttatttatttttttttttttgagttgtagtaattttagtattggttttaatgtaaatttatggatttataaagtaaagtttaatttagatttatatttgtttggaaattgggatttatagttaaagattgtttttttttaagagggaaatataattgtatgttgtagtgtgtagagggttggtgtgaaggagggatgtagggaggaagggagggaggatatataagtagtattgttgggaaaagtataggcggtttggatgttagtgtgaggggattttgtgttgtcgttgttgtaaaatcgtatttggtttgaggttatgttaataaagatattgtttttagaataggaggtgttttatagtgatgatttatttagtcgatatttgttgtttgttagatatatgatagaatgtttttgtatttggggaaagttattgaagtaaaattagaaaaatttttagttttgtggagtatgtgttttagtgggaagaggtagacggtatatatattttaatatatgtagagtaaatgaggaaagtgttagaaggtgataagtgttgtggaataggtgattagagtatgggttgtgggatagagaaggtagttattgtgtcggggttgttagcgtgggttttgttgggaaggtgatttttgatgaaatatttgaaggatataaaggaatttgttatgagggtatttggaagaagttttttttagggagtaggaatttttagtgttagtgtattagggtaggattatgtttgtgtgttttgggaagaatacgggatcgggtatggttagagtagagagttattgagataaggttaggggtttggttagattatgtgggtatagggtttaagtatgtgggaaggattttgattttgaatgagatagttttaagtagaataaagatatgttataattttttttttaaaaggattattgtagttgttttgttgagaatagaatttaaaggtcggcgatgagtaaggtaggtgggaaaattgtaggaaatgagtgtagtattttaggttggagatgtcggttattttaattggggtgtgagtagtggaaatagtgggacgtgattggatttttattatttttaattattttatatcgtattttttaatggattaaatttggggtatgagaaagaagagtaaaggatattaaaaatgttagattgtgattaaaaagagttgttattagttgagaatgagaagattagtaggagtatatgagaggaggggacgtcgtaggtagttattatgggagacgtgggatttgagatgtcgttgagaaatattagtgaggtagtcgggttggtagttggatagatgaatttggagatatttaggagaaatagatttgggaggtgatgttatataatagttatttaaagttttgagtttgaatgacgtttttaagggagtgattggttgtagaagagaataggaataaggattgaatattaggtttttgttgttaaaggatttgattagataatatatttagattagattgtatagttttgattttatatttagaaggtatatagattagggagttttagatttttttgtggataggaattatttggatattattttaagtttaagttgatttggaatcgagaatgagattttttatttatataatgttgttgttggcgttgatgttgttggtttttagattttatttttggtagtaagaatatagattaggatttttaggttatgtattagtttcgtttgtgaggtttgttaataagtaatttttgtattttatgcgtaatattttgatataggggtatttgtggagaggtttgagtattttataataagtttatagtaaatttggtgtttagttagatttgatattattgagattagtagttggagaatgtttaggatggggaggggttttagatttatatttaagtgttgttttattttgggttttttatttatttatttatttatttttaaggaggatgtgtttttttaattataagataggatgttgagagataaatgttattttttttattatggggtatagttagatggaagattgagaagtggtttatagtttagtagaatgaaaaaatatttgaatgttgttttttgaaattattttttagaatgattttatatttattttttggagtaaataatgatttgtaaatttttttaatttaaatataaaggagtgtatatattggtattagtatttattttattttggggaagggtattgtattagtttatagttcgtttttatattgtcgataaagatatatttaatattgggaagaaaaagaggtttaattggatttatagttttatttggttggggaggttttagaattatggtgggaggcgaaaggtattttttatatggtggtggtaagagaaaatgaggaagaagtaaatgttaaaatttttgataaatatattggattttaggagatttatttattattatgagaatagtatgggaaagattggtttttatgatttaattatttttttttgggttttttttataatatgtgggaattttgggagatataatttaagttgagatttgggtggggatatagttaaattatattggatatagaattaggtttgaagttatatagttaggaatataatttatagttattttaatttagattttttataggaattattgtttttgtttttgagtatagatgttattgtatatatttttgatattttgatggtcgatattgggttttgtggtaaagattgttattattgttgtttttgagaattgttttattattgttttttagttatttttattaaaatgtagtatttattgttttagtttttttgtgttattttattttgattagaagtttatatgtggttatttaaattgtgtagttaaagttttttgtagtgtttaattgtaataatgttggggaaagtgaattttttttttttgtagaaggaggtagtttttgttttttaataagattttttaatataggaagagaatttagttgttggaggtagaggggtgagggatggaaaaagaatgataaattttaatttttagaattatgttttgagattagaattttatttagtatattgtaggtatttgggtttggttgagtgtataataaatgatatagtttaatttatttttttgatagtttgttttggggtttagtttttgtttattttagtttttatatatagatacgtggagaagtattgtgtgatggtaaaatgtttatttgaaagtttttttttttatttttgttttttgttaggattaaaaattcgtatttgtaagatattagaggatttatgtatatattgatattttatataaatttttaatattttgttttatttgtatatgtttttagggagagttatttatatatttattagttttaatgtgattgtttatagaagtttaaaaaattattttaatttagatgttattttatttaaattattgtatgaatagttgataattatattgtttttagaagatttagtgatatggtataaatgtttattttttgtttgattgttattagtttgggatgagataaagtagaggtttatttgtatagtttatttataatttttatatgtatagtattgtgggttgttaataaatagtttatagattagtgttagtttatagattgtattttgagagtagtattggtttagatgtatttgtattttagtatttatttcggtgttagattaatggtaggaattaattagtagcgaatggggattttattttcggtaatagggtgaattaggttttaaagttgttttttttattaaaaataattaaaaaagagatgaaatgtgaaaattatttaaaagtatagaaatataaaaaagggaataatttttttggttaaaatataaatgtgggtaggatttagaaaaagggaagttgtttttattttgagggcgtttgttaaatttggaaaaattttagttttggtttttttagttttatatggtatagtgtaaaggaggtaatttttagaatttgtttgtatagggagtataagaggagatatttttgtgtattttatgaaatatgggaaataaaagatgtgtttttttagagtaagaaaagaaaatttgttttattttttagtataagagtattttaaagaaatttgtttttgagttagtaaaatttgtttttgagaatttataattattagttagtatttttgtagatttgttgtttaaattagttttatcgttttgggttaaaataattttaaagtatgattttgattaataattgttttggattagcgatgatttaaaaattggaagaaggaaataaaaatttttataggaatgtatatttaatttatatgttaaagaatttgtttaaataattttataaggaaaaagttgtttagagtatgaattgtataaagtataagtggagaaaagttagtttgattgagaattagtggaaataatagataagaggtttataaagttttaatatttgaattatgaaataaaataacgtaattagtattatatttaaaataattatgagttgggtacggtggtttatgtttgttattttagtattttgggaggttgaggtaggcggattatttgaggttgggagtttgagattagtttgattaatatagaaaaatttcgtttttattaaaaatagaaaattagttgggcgtggtggtatatgtttgtaattttcgttatatgggaggttgaggtaggtgaattatttgaaattgggaagtgggtattgtggtaagtcgagattgtgttattgtattttagtttgggtaataagattaaaattttgtattaaaataataataataataataataataataataatgataagtttgaaaatgtttatagaatgtattaatttaaaaatgatttgttttttaaaagaattaaagttagtttttaggaagtaaaattaattttgattttaaaatttttaatttagttgaattaaaaattgaaaagttatgatttattgatttttgttttggattatgatggaataataaggattagatttatttttatgttttaagtataataaatttaaaataatatatgaaaaaatagttatgtatttagatattagatagtaggtattttagagattgtgatttttgggagaaggggaatggaaaaggtaaggtttatagttgtttagttttttttttggatagagtttttaaggtagagtgtagagaggtagagttttaattaggaggtttattgaggtgaggggatagagttgtgaatttggagattttaggatatttagaatatgtaaagatgaaggtatatagaaaagatagttgatgataaaaagtattgtaagtttgtaggaggtattttttaaatttttagttaattagtatattatataagggaattatttaaagatagggaaagaattattcgaaaggattttagagaatagtatttagtgatatatagggttggaaataatgtttgtttttattagttagattggaaaattttataatttgttgagtattggatagagtattttgaagggttttatgttagtagtggtaaataattagttttggattaaatattttttgtttttttgttaaaagatattaaaagatttaaaatgattaaatagtttttgaataatttaatttgttttagtaaaaataaaaagtttagtcgggtacggtggtttatgtttgtaattttagtattttgggaggttaaggtgggtagattatttgaggttgggagttcgagattagtttgattaatatggagaaatttcgtttttattaaaaatataaaattagttgggtatggtggcgtatgtttataattttagttattcgggaggttgagataggagaattgtttgaatttaggaggtagaggttgtagtgagttaagtttttattattgtattttaggtaataagagggaaattttgttttaaaataataataataataataaagtttatgaatatttatagaatgtaaaaatatttggtatttaatttggtaaagttatgtttggtattaaataaaaataattattaggtatataataaaaataagaaaatataatttagaaggtagagaaaattattagtttaaagttatttagaattgatatagatgttagaattagtaggtaataatataaaacggttattgtaaatgtattttatatgtttaaaaagttatatagagatatgaaagatatataaaatattaaaattaaatttttaaagatgaaaatgttagatataaaatatattggatgtgaggtgagattaatggtaaattttatgttgtagattaaatagtgattttgaagatatagaaatagaaattttttgggttaggtgcggtggtttaagtttataattttagtattttgggaggtttagatatagaaggaatgtattttattaggataaaggttatgataaatttataattaatattatatttaatggcgaaagttgtatattttttttgtaagattaggaataagataatgatgtttattttggttatatttatttaatattgtattgataattttaggtagagtaattagggaagaaaaagaaaagggatttaaattggaaaaaaagaagttaaattgtttttgtttgtagattataagattttatatatggaaattttaaatattttattaaaatattattggtattgaaaaaaaaaattagtgaagttgtagtatataaaattagtatataaaaattagtggtatttttatatatttattaaaaattgtttgaaaaagaaattaagaaaataattttagttataatagtattaaaaagaataaattaggaataaatttgattaaggagttgaaagatttgtatattgaaagttataatagtgataaaaaaaattgaagaagttataaataattggaaagatatttttgtttttggattagaagaattatattgcgaaaatgtttatattatttaaagtaattaatagatttaatgtaatttttattaaaattttaatgggatttttaattgaattagataattttaaaagtcgtatggaattataaaagaattgtaatagttaaagtaatttttaataagaataaagttggaggtattatattttttgatttaatatgatattataaagttatattaatgaaaatagtatggtattggtataaaaatagtatatagaataatggaatagaatagaaagtttagaaataaatttatgtatatataattaattaatttttgaaaaggtgttaataatatataatagggaaaggatatttttttatatatatagtgatggaaaaattggatatttatatggaaaaaaataaaattgtatttcgattttatattatatgtaaaattaatttcgaatagattaaagatgtaaatgtaagatttgaaattataaaatttggagaagaaagtaggtgaaaagtttcgagatattggttttggtaatgatttttttgggggtattattttaaaaatatatgttaaaaaagtaaaattaaataagtgagattatattaaagtttttgtatagtaatataataataaataaaatgaaaaggtaaattatagaatgagagaaaatatttgtaaattttatatttattaatgggttaatatgtaaagtttatagattttatagaatttaatagtaaaaaatagataatttagtttaaatatgggtaaaagattcgaatagatattttttaaaaaagatatataaatgattaagaagtatatgaaaaggtgtttaatattattaattattagagagttgtaaattaaaattgtattgatatattattttatattagtaagaatagttattaataaaaagataagagataattagtgttggtaaattgtagagaaagggaatttttatatatggttggtaggaatgtgaattggtaaaagtataatggaatataatatagatgttttttaaaaaattaaaaatataattattatatgatatagtaattttatttttgggtatatataaaaaatgaaattagtaaagaaatttttgtatttttatattaattgtagtattatttataatggttaagatatagaaataaagtaagtgtttattgattaatggatgaataaagatattgtgatatatatatatatatatatatacgaatattatttagatatgaaaaggaaggaaatattgttatttgtaataatatggataaatttgaaggatattatgttaagtgaaataagataaatatagaaataaaaatattgtatgattttatttatatgtgtaatttataaagtggaatttagagaaatagaggtagaaatagttagttgaattaatttaattttgatttgaggttgtttgtgtatttaagtaagtaggtaaataaattaaaatttaagttaggagtataattgttagttggggtttatttaattataagtagttagtttattatattatgtttaaataaggtaaatgtttagttgtagttaattaggtgatttttttttttttgtgtttggtatataaaggtttgttgtgtatatttttgggtggagttttttgatttttttttggttttgagtgttgttaaatttgtaaattattttttgtttaaataaatttttttaaatttagtttgtttaaagttgatggaatttttttttttttttttttttttttttttttttttaggggttattaggagttatggttaggggaaatggggagatgttggtaaaagtttattaatttgtagttatagggtgaataagttttggaaatttaatgtatagtgtgaaaggaaaaataattttaggtttttaaaattattaagttaaagtgatttgggtttataataggatggtaattattggtatatttgaaatttattaagagaatagattttaagtatttttattatatataaaaatattaattatgtgttatagatatgttaattagtttgattgtggtaattattttataatatatatgtattttaaaaattatgttgtataatttgaatgtatataatttttgtttgttaattatgttttaataaagttagggaaaaataaaatatttagaaataaatgtaataaaagaagtacgaaatttatattataaaaaaatcgataatatttttatagaaattaaagaattaaataaataaaaagatgttttatttttatggattagaagataatattattaagatggtagtatattaaaattggtttataaatttaatgtagttttattaaaattttagttgattgttttgtagaaattgataagatgatattaaaatttatatggaaatttagtgaattataaaagttataaaatttttgataaagaatagagtttgaggaattatatttgtttatggtaaaagttattataaagttgtaataattaatatagagtgatattgatataaggatagatatatagattaatagaatagagaggttagaaataaaagtttataattatggttaattaaattttaaaaatattgttaaggtaatttagtgggggaaagaaaaattttttcgagaaattatatataatttaatagtaataaaataaataatttaatttaaaaatggataaaggatttgaatagatatttttttaaagaagatatataaatgattaataggtatatgagatggtgttgaacgtaattaattagaaaaatgtaaattaaaattgtaatgaagtgttattttatatttgttagaatagttattattaaaaagataagaggtaataagtgttaatgagggtgtagaggaaagggaatttttatatatggttggtgggaatgtaaattggtataagtattatggaaaatagtatggtttttttttaaaaaattaaaacgatttttttttaaaaaaattaaaaatagaattattagtatatgatttagtagttttatttttgggtatgtatttaaggaaaatgaaattagtattttaaagaaatatttgtatttatatgtttattatagtattattttttggaaataatttgaatgtttgttaattgatgaatggattaaatatatgttttattttattttatgttgttataatataatattatagattgggtaatttataataaatagaaatgtattttttttcggtttaggaggttatgaatttaagattaaggtattggttaatggtgagagttattttgttgtattattatatggttgaaggtagaagggtaagtaaagtatagagaatatatttttggaagtttttttataaaggtattaaaattatttttaagggtggaatttttatggtttaattattttttaaaagttttattttttaataatgttataatagtaattaaattttaatatgtagttgggtgtagtggtttatttttgtaattttagtattttgggaggttgaggtgggaggattgtttgagtttaggagtttaagattagtttgggtaatatagtgagattttatttttataaatatatatatattttaatttatgttgaaatataaatgggttgaaataatatgggttttggaggggataaaaatttaaattatagtaatatggtgtgtatgtatatatatatatataaaatggaataatagttatagaaaaaggaagtattgatatttgtaataatatggatgaatttggaggatattatattaaatgaaataagttagatatagaaagataaatattatataattttatatttgtaatttaaaataagtgaaatttttagaaatagaggtagaacggtggttattaggggtttgagtgggagaaatggggagatgttggttaaagggtgtaaatttttagttatataatgaataagttttagaaatttaatgtttagtatgggtagtaatggatttgttaatttggttgtaataataattatataatgtatatgtgtattaaattattatgatgtatgttatgtataattttgttaattaaatgttttttaaatatgaaatggttaatggttaaaaaaaattgtgttgatgtaattgtatatttatttgtaaaagaatgaagtttgattttattttatattatatatataaatgatttaatatggattaaagatttaaatgttagtgttaaaattataaaatttataaataaaaatgtatgtaaaaatttttatgatttcggattaagtagtgttttttaaatatgatattaaaatataagtaataataaattaaatagataaattttattttaataaagtttaaaattttgtgttttaaagaatataattaaaaaagtaaaaatattatttttaggttaggagaaagtatatataaattttatatgtgagaaagaattagtatatagaatatataaatttttataagttaaaaattaaaagataaataatataagtaaaaaatgaataaagggttgaatagatatttttttataggagatagaaagatggttaataagaatatgaaaagatgtttggtattattaattattagggaaatgtaaattaaaagtatagtgatatatttttgtacggttattggaatagttagaataaataagatagatattaataagtagtggtgaggatgtggagaaattggaatttttgtatattgttggtaagaatgtaaaatggtgtagttttttaaagaatagtttggtagttttttaaagtttgaatgtagaatgagtatttgatttagtaattttatttttaggtatatatttaagagaaatgaaaatatgtttatgtaaaaatttgtatataatggttaagtagtattatttttaatggttgaagagtggaaataatatagatgtttaggaataaatgaatgaataagatatggttaatttatggaacggaatatttggttataaaaagaaatgtagtattaataaatgttgtaatgtggatgaattttgaaaatattatgttatgtgaaagacgttagttataaaagattatttattatattattttatttatatgaaatgtttataagaaataaatttgtagagagaaagtagattagtggttgtttaggattgaggaaatgttggagggaaaaatggggatgattgtttgagaataaatatatatgggtgatgaaaatgttttaaaaatagttttggagtgatgaatatgttttataattgattgtggtgatggttgtattataaatatgttaaaaattattgagtttaaatggttgaataatatatgaattttattttaatgaaattgttttaatgaaaaatgatggtttatatgaaataaaatcgatgtgttagagttgttatggtagattgtggagaaagagattaaaaggtttagagtagtgagtatgttggtatagatagatatattttataaaattggattatgtattgggtgattgtttatttggaagggtttaaaggaaattttgtttattaggtagtaagttatgggtaggtgaacggggtattaatttaattttgttttttgtgggttggagttgattttatgagatgatattggagaatttggtgttttagtaataataggatagtaggattttagaaagttagaggttagttggtagtaaggtagaattaaaatggataaaatttttaaaatagtgagtaatgttagaatggaagttaggaaattttgattgtaagggatttagggaaattattaagattatggtgtttttagttgggtagtttataagattgttgtttaatattagaattaatagatgaaaaatagatgagttgaagtttgagattaatttttttaatagaagtttaaaattttttgtttagtttttagatttgagttagtgtttagatttagaatttatttattgaaggagagttacgttttttgatgaagtatttgtaatattataagtgtgtatagtagatattttttatatttttttttaaagggattaatggttatttatttaggtattaagatattgataaaggggaatgtttagatatttttaggtttattggatatagggtttaattttatattgatatttggggaattaaagtatttttatggatttttattagaggagagttatatagggaattgaaaataattttttgttttaggtttattcgtattttcgtggattttttgtgtttatatatttgtttggtggttatttttttggtttttaaatatgtaattgatggatttattttgtatattagttattttatttatattttagttattttatttgtggaataaaggatttgtagtaagaaaggttaagtggatgtttttaagagagtttttaatatcgattaagatagaaattttaaaataatgtagtatttgaggggtaatgaaataaattgttatttaaagatataaaagatgtaggggttgtggttttattattaattattgaatttattattttagttttagtaaaaattggatggatgataatagatgatagtggattaatgaaaatgtaatttataattagttttaattttagtagttgtgttgaatgtgatatgtttaaaaaaaaaagatttattgtttttgtatattatataatgttattgatttgtttaaatgtatttttttaaatatttataaaaaggagggttagaagcgagttttatttatagaggataaataataatatattttaaaaaatattttatttttgatttttaatttttgtgggtatataatagttgtatatatttatggggtatatgagatgttttgatataggtatgtaatgtgaaataagtatattatggagaatggggtatttatttttttaagtatttattttttgagttataaattatttaattatattatttttaaatgtgtattattgattatagtttttttattgtgttattaaatagtaggttttatttttttaaatttttttttatcgattaaatatttttattttttttttagttttttattattatttttagtttttggtaattatttttttattttttatgtttattagtttaattgttttgaatttaggttttataaataagtgagaatatgttatgtttgtttttttgtgtttggtttattttatttaatataatgatttttatttttatttatgttgttgtaaatgattggattttatttttttttatggttgaatagtattttattgtgtatatatattaaattttttttatttatttatttgttgttagatatttaggttgtttttaaattttagttattgtaaatagtgttgtaaaaaatataggagtgtagatattttttttatatattgatttttttttttgagatagggttatattttgttatttaggttggagtgtagtggtatgattttggtttattgtaatttttattttttaggtttaagtgattttattttagtttttatagtagttaggattataggtgtgaattattataattgtttaattttttttttgtattttgtagaaattaggttttgttatgttgttcgggttggttttgaatttttgggtttaagtgatttgtttttttcggttttttatagtgttgggattataggtgtgagttattatgtaaaacgttggttttgttttttgtggggtatatatttagtagtaggattgttgtattatatcgtaatttaatttttagttttttgaggaatttttaaattgttatttatagtggttgtattaatttatatttttattaatagtgtacgagggtttttttttatttatatttttattagtatttgttattgtttgttttttggatataagttattttaattggggtgagattatattttattgtagttttgatttgtatttttttgaggattaataattattagtatttttttatatgtttgtttgttatttttatgttttttttttttttttttttttttttttttgagataatgttttttattttgtcgtttaggttggagtgtattggtgtaattatgatttattgtaggtttaagtgatttttttattttagttttttaagtagttgggattataggtgtgtattattatttttagttattttttatttttgtattttgtagaattggggtttgattatattgtttagtttggttttaaatttttgggtttaattttatttgttttggttttttaaagtgttaggattagaggtataagttattgtatttggttttgtatgtttttttttttttttttttttttttttttttttttttttttgtgagacggagttttattttgttgtttaggttggagtgtagtggtgtgatttcggtttattgtaatttttgttttttaggtttaagcgatttttttgttttagttttttgagtagttgggattataggtgtgcgttattatgtttggtttatttttgtatttttagtagagacggagttttataatgttggttaggttggtttcgaatttttgattttaagtgatttattcgtttgggttttttaaagtgttgggattataggtatgagttattacgtatggtttgtatgtttttttttgagaaatgtttatttaaattttttgtttatttttttatttagatttttagaattttttttttttttttttttattatagagttgtttgagttttttatatattttggttattatttttttgttagatgggtagtttgtaaatatttttttttattttgtgggttgtttttttattgattgtattttttgttttgtagaagtttttaaatttgatgtgatattatttgtttagttttattttggttgtttgtgtttgtggggtattgtttaagaaatttttggttagattattgttttggaggttttttttaatgtttttttatagtagttttatgtttgaggttttagatttaagtttttattatattttgaatttattttttattttttgagatggagttttgttttgtcgttaggttggagtgtagtggtataattttagtttattgtaatttttattttttgggtttaagcgatttttttgttttagttttttgagtagttaggattgtaggtatatgttattacgtttagttaatttttgtatttttagtgggtgggggggggtgagttttattatgttggttaggatggttttaatttttttatttcgtgatacgtttgttttagttttttaaagtgttgagattataggtgtaagttattatgtttagttttgatttgatttttgtttatagtgagaggtaggggtttagttttatttttttgtatatggatatttagtttttttagtattattttattgaagagattgtttttttttttttttagtataagtatttggtaattttgttaaaaatgagttttttgtgagtgtgtggatttgtttttaggttttttattttgttttgttggattatgtgtttgtttttatgttagtattatgttgttttggtgattatagttttgtagtataatttgaagttaggtaatgtgatttttttagttttgatttttttgtttaatataattttggttattttgggtattttgtgtttttatataaattttgggatttttttttttatttttttgaagattattattggtattttgatagggattgtattaaatttgtagattgttttgggtagtatggatattttaataatattgatttttttaatttataaagatggaattttttttattttttttgtgttttttttaattttttttattaatgttttataattttttttatagatattttgtatatttttggttaatttttaggtatttaattttatgtgtggttattgtaaatgaaattatttttttaaatttaaaattttttaaattgtttattgttgatatatagaaatgttattggtttttatatgttgattttgtgttttgtaattttattgaatttattgattttaatagtttttttgtggagtttttaggttttttttaaatataagtttatattatttgtaaattagggtaatttaatttttttttttttagtttggatggtttttatatttttttttgtttgatcgttttagttagaatatttagtattttgttgaataatagtggtgatagtgaatatttttgttgtgttttagattttataggaaagttttttattttttttttatttagtatgatattagttgtgggtttgttatatttggttattacgttgaggtatattttttttatatagttttttgagggtttttattatgaagggatgttggattttataaattatttttttagtattaatagaaataattatatggttttaattattttttttgatatgatgtattatattgattgatttgtatgtgttgaattatttttgtattttagggataaattttatttggttatgataaatgattttttttttaatggagttttattttgttattaaggttggagtgtagtgttataattttagtttattgtaatttttattttttgggtttaagtgatttttttgttttagttttttgagtagttgggattataggtatgtattattatattcggttaattttgtatttttagtagagacgaggttttattatgttggttaggttggttttgaatttttgattttaggtgatttgtttatttcggttttttaaagtgttgggattagaggtttaagttattgtattcgattttgatgaatgatttttttaatgtattgttgaatttagtttgttaatattttgttgaggattttggtattaatatttattagagaaattggttagtagttttttttttttgatgtgtttttgtttggttttggtattagggtgatattggttttttagaatgattttggaaatattttttttttttttattttttaatagtttgagtgggattggtattagtttttttttaaatgtttggtagaatttaatagtgaagttatcgggtttttggttttttttagtgggagattttttattatggttttaattttgttatttgttattagtttgtttaggttttggatttttttttggtttagttttagtaggttgtatgtgtttaggaattgttaattttttttagattttttaatttattggtatagagttgtttatagtagtttttaatgattttttgaatttttgtagtgttagttgtaatgttttttttatttttgatttgtattttgtttttttttttttagttttgttaaaggtttgttagttttgtttaatttttgaaaaaaagtaattttttgttttattgtttttttgtattgatttttattttaattttatttatttatgttttaatttttattatttgtttttttttaattttgtgtttgttttgtttttgtttttttggttaaggtttattgttaaattgtttatttgaagttttttttttttttttatgtaggtatttatagttattaatttgttttttagtattgtttttgtcgtattttataggttttggtatgttgtgttttttttattatttgttttaagaaattgtttaattttttttttaatttttttattgatttaatggttatttaggagtatattgtttaatttttatgtatttgtagttttaaaaattttttttgttattagtttttagttgtattttattgtggttagagaagatgtttgatggtatttaatttttttaatgttttaagatttgtgatttaatatatggtttatttttgagaatgatatatgtgttaaaaaagaatgtgtattttgtagttattggataaaatgttttgtaagtatgtattagatttatttgatttatagtgtagattaagtttgatgttttttttttattttttgtttggaagatttgtttagtgttgaaaatgtggtgttgaagtttttagttattattgtattggggttattttttttttttagttttaatcgtatttgttttatatatttgggtgttgtagtgttgagtgtatatatatttatatttgttatatttttttgttgaattgaattttgtattagtttatttttgtattgttataaagaaatattcgagattgggtaatatatagagaaaagaggtttaattggtttatagttttgtaggttgtataggaagtatggttggggaggttttagaatatttataattatgataaaaggtgaaggggaggtaagtttgttttatatggttggagtaggaggaaagtgggaggaggtggtatatatttttaaataattagattttataataatttatttattgttatgagaatagtatttagggggatggtgttaaattatgagaaattatttttattatttaatttttttttattaggtttaatttttaaaatttaggattataattgaatatgagattttggtggggatgtagatttaaattatattattttatttttggtgttttttaaattttatgttttttttatattgtaaaatatagttatatttttttaatagttttttaaagttttaatttattttagtattaatttaaaagtttaaagtttagagttttaatttgagataaggtaagttttttttatttgtgagtttataaaataaaaaaatagttagttatttttaatatatagtgggggtataggaattgggtaaatatttttattttaaaagtgagaaattggttaaaagaaaggggttattggatttatgtaagtttgaaatttagtaggtagttattaaattttaaagttttaaaatatttttttttgattttatattttatatttagggtatattggtgtaaggggtgggtttttaaggttttgggtagtttagtttttgggattttgtagggtaagttattgttattgtttttacgggttggtattgattgtttgtggtttttttagttgtatagtgtaagttgttattggtagatttattattttggaatttggaggatagtggttgtttttttatagttttattaggtagtatattagaggggaagttgtgtgggaattttaattttaaattttttttttatattattttagtagaggttttttatgagggttttgtttttgtagttggtttttgtttggatatttaggtttttttatatatattttgaaatttagttggaggtttttaagttttaatttttgtattttgtgtatttataggtttaatttaatattatacgggagttattaaggtttataatttgtattttatggagtagtagtttgagttatatttggggttttttgagttgaagttggagttggagtagttgggatttggagagtagttttttgaggttgtgtagggtagtaggattttgagtttggtttaggaaattattttttttttttaggtttttgggtttgtgatgggagaggttgtttttaaggtatttgaaatgtttttaaggtgttttttttattattttggttattaatattttgttttttgttatttgtaattttttgtagttagtttgaatttttttttagaaaatggttttttttttttttataatatggttaggttgtaaattttttaaatttttatattttgttttttttttaaatataagttttagttttttgttatgtttttgtttataaatatgagtatagattattagaagtagttaggttacgttttgaacgttttgttgtttagaaattttttttgttagatattttaaattttcgtttttaagtttaaagttttatagatttttagggtaggggtataatgtttttaattataatgttttaataaaagtgatttttattttaggttttaataagttttttatttttatttgagatttttttagtttggattttattgtttatattattattagtattttggttaaaataatttaataaatttttaagaaattttaaatttttttttatttttttattttcggagttttttatatttttttaatttttgtttattttttagttttattgttgtttttatatttttaggtatttttttagtaatgttttatttttttttattaattttttgtattattttgtttttatattgttataaagaaatatttaagatttgttaatttatgaagaaaagaggttgaattggtttatagttttataggttgtttaggaagtatagcggtatttgattttgggaaggtttgagggagtttttatttatggaataatgtaaagtgggagtaagtatttatatagtaggagtagattaaggtaagcgggtggtgtggagaggtgttatatatttttaagtaattagattttagaagaatttattattatgagaatagtattaagaagatggtgttgaattagttatgaaagatttatttttatgatttaattacgttttattaggttttatttttaatattgaggattataatagaatacgaaatttgggtggggtataaatggaaattatattaatttttttattattgtatagtgattttatttgttttatagtttttgtattaaaattaatatttttttttttttttttggtttttattggtatggaataattttttttaattttttatttttagtttatgtgtgtttttatagtttaagtgtgttttttgtaggtaatagattaatgggttttgttttttttatttatttagttagtttatgttttttgattggagagtttagtttatatttttatttaatgtattatcgataagtaaagatttatttttgttttgttatttatttgttttttggttgttttgtggttttttttttttttttttttttgtttttttttagggaaggtagtttgttttggtgatatgatttaggtttttgttttttattttttatgtatttagtgtatgtttttaggtttgaggttattataaggattataaatattattttgtaatttattattttaatttggtaatattgtttgtattaataaataaaaaattaataaaaattttatattttaattttatttttttattttttaattttttgttgtttttaattttattttatttttttgattggttttgaaaagttgtagttattatttttgattggtttattatttattttttttatttatatattatagttataatgttattatattttgggtttttttgtgtatttatttttaatagtgagttttttatttttagatgattttttgttgtttattaatgtttgtttttttttgattaaagtatttttttaagcgttttttatgggattagtttagtgttgatgaaattttttagtttttgtttgtttggggaagtttttgtttattttttatgtttgaaggatatttttgttggatatattattttagggtaaaaggttttttttttttagtattttaatatatgttatgttatttttttttggtttgtaaggtttttattgaaaaatatattgttagatgtattggagttttattgtatgttatttgtttttttttttttgttgtttttaggattttttttttatttttgttttgtgggagtttgattattaaatgttttgaggtaatttttgggttaaattggtttggtgttttataatttttttgtatttggatataaatatttttttgtaggtttaggaagttttatgttattattttttttaataaattttttatttttatttttttttttattttttttttaaggttaataatttttagatttgtttttaagaagttattttttagattttgtgggtatgtattattgttttttattttttgttttttttgaatgtgtatttttttttttttttttttttttttttttttttttgagatggagttttgtttttttattaggttagagtgtaatggtgtgatttcggtttattgtaatttttgttttttgggtttaagtaatttttttgttttggttttttaagtagttgggattataggtatgagttattatatttggttaattttgtatttttagtagagatggggtttttttatgttggttaggttggttttaaattgtcgattttaggtgattcgtttattttagttttttaaagtgttgggattatagtcgtgaggtgagttattgtgtttagttttgttattgttaatagtgttgtaatgaatatatatttgtatgtgtttttatggtggaatgatttatatttttttaggtaaatatttagtaatgggattggtgagttaaatggtagttttgtttttagttttttgaggaattattatattgttgtttatagtgattgaattaatttatatttttaataagtgtataagttttttttttttataattttattaatatttattatttttttatttttttgtagttattttgattggtagatgatattttattatggttttgattttgtatttttttaatgattagtgataattgaggttttttttaatacgttagttggttgtatgtatgttttttttgaaaagtgtttgtttatgttttttgtttattttttaatggagtgggtttttttttttttgtaattgtgtttaaattttttatagatgttagatattagttttttgttagatgtatagtttgtaaaaattttttgttatttggtagattgtttgttttgttgtttattttgttatgaaaaagtttttaaatttaatttgtttatttttgtttttgttataattgtttttggtgtttttattatgaaatatttgttagtttttatgtttagaatggtattgtttaagttatttttaggatttttataattttgggttttaattttttaaattattttaatttttgtatatagtaaaaggggtttagttacgattttttgtatatggttagttagttattttagtattatttattgaatagggagatttttttttattgtttgtttttgttaattttgttgaagattagatggttgtaggtttgtggttttatttttgggttttttattttgttttattggtttgtgtgtttgtttttgtattagtattatgttgttttggttatggtagttttgtagtttgaagttaggtaatgtgatgtttttatttttgttttttttgtttaggattgttttgattatttaggttttttggttttatatgaattttaagttttttttagttttgtgaaaaatgtaattgatagtttgataggaatagtattgaatttataaattgttttgggtagtatggttattttaatgatattgattttttttagttatgagtatggaaagtttttttatttgtttgtgttatttttgatttttttgagtagcgtttgtgatttttattgtagagattttttatttttttggttagttgtatttttgggtattttatttttttttgtggtaattatgaatgggattgtgtttttgatttggtttttggtttggcgattgtgtataggaatgttagtgatttttgtatattgattttgttttttgaaattttgttgaaattattagatgaaggattttttgggttgaggttatggggttttttagatatagaattatattgtttgtaaataaggatagtttgattttttttttttttatttggatgttttttattatttttgttgtttgattgttgtgattaggatttttaatattatattgaataggagtggtgagaaagggtttttttattttgtgttattttttaaggggaatgtttgtagtttttgtttatttagtatgatgttggttgtgggtttgttatagttggtttttattattttgagttatgtttttttaatataagatgggaagttttttaaatttatattttttgtttgtgggggagttatttttagtatatcggttttatttaatttatagtagatattaatatttttatgatggatgagttatggtggagtttttttaattttagagtgagaattggttttcgatggggatttagggagggttgagttggcgagttgtgggaggttattattagtggggtttaagtttttttttttaagttttaaggatttttgtagttataggacgtattttttttttatttagattttgtttgtgaagtatttaattgttttttatttttatttggtgtagaatgtagggggtaatgaatgaaattgtcgtatattgtagagggtttatgtttaagtataggtagttgtaacggtagtagttatattattagtatttgtggtttttgttagtttttttattgtttaggttagatagtgttagtttggtagatgtatttttaaggatttttttttatggtgtttgtttttttgttttatttttttgattttatagtttttttttaggtgatatttatattttagataaagttgtttggttttttgattatgattttttttatttgttgttagttttgtttgggaagaggtttatgtttagttttaggatatatggaaaaggtagtggatgggtaggtatagttttgggttttattatgaattgtgttgtttagttaagttgtttaatttttattttgtttattttgtatatatgggtggggggtgaagattatgagtttataggtttgtttttgtgtttattgtaatagatttttaagtgtaagtttttgaaataggattatagtatataatattaatataagagggtatattatgtacggtatagttttttttgaggttttagagaatgtaaattttaatattaataagtattaaatttttgttgaaaaattttttaatgaattttaaggttaaatataaataaattgtgggattgttttgtttagagtagttatatttttttcgggggttttatagtttataggtttaaattttttatttaatagttatatgttttattaatttttagattgttttttttagtaggtagtgagtttttagaaggtagggattatgtaacggtgatttggtaattttgttgaatagttgtttttattaggattagttcgtaaaaagttaagtattgtttagttttttattatgttttttattgatttatgtttttatttggtatttaagaatttgttttaatagtgttaaatagttgggagatatttattataaattattaaaattgtagtttattttttgaattaattgtgtttaattttattatatattttgttgttttttaatttttagttgtttggaaagttttatattttttatttatttaaattatatatatttttcgggttttatgtaaagttttattttatttatgaaattttttgattattgggatatttggtttatgaatttgagtaaattattttttttgtattttatttggtatttgaggagggattgttttttgacgttttttggtatgttttatagagttagtaaagtgtttttagatttataggtattattttatattgttagttttttgaggatatatattaggttatatttttttggttttttattttaagtatttaaaaggtagatggtaggtatattttagttttaaagagattgttgaagattgaatgaattaatgatatatagagaaattgattttggtgagtagtttgggttagtttatttacgtgattgtgggggttggtaagtatataatttttaggttagattggtaggttggagatttagggaagagttgatattgtagtttgaggttataggtagtagtgttgttgggttgttgtattttttattgtgagatttagaaaaattgttattattattattttaatattgttaaaatttgtaggtagtttatttgttgtttttggtttttattgttagtgtgttgttatttttgtggaaattataattgtgtagcgttttgatatttatgaatttaaaaatttaaatagaatattaagaataaattaataataaagtgataaattttggatatttttttaatattgtttttaaatattgtaaatatgaattttttggattttagagggaataaggaagtaatgatattaataatgaattataatttggaatatttgatattgtatataaattataataattggaaatgtttttgtaattgtataagagttagtttaaagaaataataatttgtatttttaaaatttaaaaaatttttaataatttttgataaaatttatagatggtttattattgttagtaatgtaaatattggatgtaaattatgtttaaaagttgtgtgaatagttaaaagtgttaagtatattttgttagtgtttataatttaaggaaaatattagtaaaatttaaagaaaaaaatttgaaaaatattaagaatagttttgtataataaagtatttgaaaaaagtaataaatagtggaaaaatgttattagatgttagtatatagtttatttaaatgtgtaattaaatagagtattttatattattaagtagaggtttttaaataattatatatagtgtatattattgtagtatagattaatggttttgttggttgtaaattatattttatataagataatttttggaaaatttattaatttaagtaataaattattattagtgaagtgttaattattttataaaatgtatttaagttttagttttttaaatattaaatgtaagatttataggaaaatgggtttttgttgatttgaggaatttatattaattttatttattagtgtttaagaaaaatagttttaatgtgagatagttgtatgatggtatagatagtgttagtatatgtaacgaagaaagtttaggttttattaaaattttgtaaaatttcggggtttaaaaatttgtttatcgtagaagttatattgattgttttatatttattttttttcgtgttttgattttgttgatttgtttatatgggtaattacgaagttggtataattatatttttttgtttattttggttattattatttgttttgttgttgggttgtttatgtgtaggtaggttttacgaaaatattaggttttttaagtaatatgaattgggaggtttagagagggatttttttagttattgatttattgagggattgatttaagatttttaggtattagatagaagtagtcgggaaaggaattattttttgattgtttgtgggggaaaaagaaatttttttggatagaatagtttggatggattttaatatagtaaaaagtgaaggtagtgtattttttagaagggcggtagatggggtattacgtatttttatagaggggttgttttgcggtttttgtaggagttgttaggtttttaaaatttttttttgttgttatttttattttgtttgaaaagaggtgaggaggatgatggggagggagttaaatagatttgggataggaggagtgagtgcgttggtaaaattaattatttagttaaatttttggttaaaattttaggaagggaggtataaaatgggaaagtgtgggttttttttttttgtttttttaggtgaaggtttaaattaattttagtatgggtaaaattattttttttttttttttttttttttagagtttttattatttttttttaggttaaattttttatgttgtaggagatagagaattttaggtgagattcggatttttttttttttttttttttttttttttatcgtgtttaggataaattattttggttttgtttttggagggaaaagggtagagaggttttgatttgaattttaattatatttttgtatatagtatttgaggagatagaatagtagaggggtgggaataattaatattgttttatgggttttagaatggagaaaaaataatttttattttttttttttttatttaaatttaattttagttttttttttaattttttaaaattattattaatattattattatattatgtgtagttatttggggggtggtgaaaggttgagtacgtattatgtttaggtagtagggtgttaaacgaaatagttttttatagtaatgtttaaagttatttttggttataataaaggagaataaagggaaaaaagtatgattattgtattagattgtggggttgtaggtgagttttttttttttattttaaaaattattttgtggttataatgatgatgttaatttttaaaaaaataaaagaatggaaaaagttgatttgggattttataatgtaaagaaaaaagtaaaataaaaaagaataataaaaagtaaataaaatagatttatatgtaatatttaatttaatttttttataattttgtgaagtgggttagtattgacgggttagtttaattaatagatattaggaatgagatttaaaataattagttatggtcgtatagtttgtggaatttaggttttttgatatttagtttagtgttttatttgtaatggtaatttaagtgaggagggggttttagagatgaggtggtcgatttttataatgttgatattttttatgtttttttagagtaagtggttgaatttttttcgtgatagagaatttattatttattaaggtagtttattttattaagtttaatttttaaaaaagatatttatgatgagtataattttgttttttttatattttatggaaacgattaatttttgatttttatgttataaagagtaagtttagttttttatataatagttttttaaatatttgaaatttttagttatagttagatatattgtattaaaataaatggttattttttgtaggagggttggtttaaatgttttagtttattattatttgaagtaagaagttttttttattttttgaagaattatatttatttgtttaaattatatttattaggggtttgttatttgttaggtagtggggatgtagcgatatataggttaaataggtatttggagtgtggaagtgggtgtttattttagtcggggagtattttaggatgttttttttaaggagatgatatgttaattgagtttagaggataataggagttgatagggaagagtattttttagagcgagaaattggaggtagttgtagtgaggtgttgatgggttttggttattatttggattatttagatttgatgtttttttatttttatttagttgtgtgattttggataagttttttatttattacgtgttttagaatttttattgtgaaatgggagatgtgataggaatgttgtgaggattgtttgagtgaatatatgtaaaggatttaggataagtttggtatatagttaatgtttaattaatgttttttttcgtaattggagggaaataaggtagtgggtaggaagggggagtgcgtagatagtttttgttaagttttgtaagttattatggtttagtattgtaattagagaagtgaggatgagatttttattttgagaaaggtttttttggtcgtagtatgtaaaggaatgggaggggattagaatgtgtgtgtacggattaggtgggagttaattgtagggttagtatttgtggtatagattatttttttttattttgaattttttttttttttcgtttcgaattttttttttatttttgattatattttttatttgttagaaagttatagttaaggaagagattttcgagtatattttggatagaagttatgatgatggggtttatgattggtaatttgttgggagaggtggtttgtagtgtgtttggagtatatgggggatttcgggagtattttttgtgtttgtggtttttggtaggtttgtattatttggtgttatgttattattagatttattataggagttatgtgttatttattttataaggagtttttttaatagggagatattaggtttaattggattttagttattttggtttttagttttttatttttaagtttatgagtgataatttagtataggaaatttggttttgtgagtagtatttattggtaggatgattagtaatttttgtgtgtggtttgtaaagattttaacggagaataaatgttatttagtgttgtagaaggagaataatgttaggttttataaggtagtttgtttttttgttgttttgtttatattagagaatttttggttgatttgttttaatattggttttagttttattataaaataataataaattattgtattttaaatatagttttaaatgtaataatagtttattttttaattttggattatatagtttataattatttgtaaatgtatagtattttattttaaaaaattttaggtatttaggtattataatttttttatttgtatgatatagaaatttttatgttattagaggattttataatttatatatgaattttttgaagattttttggtgtgaaggaaatattattggatataatattgaaaatggtaatagtttaggtatggtggtttatgtttgtaattttagtattttgggaggtttacgcgggtagattatttgaggttaggagtttgagattagtttggttaatatagtgaaattttatttttattaaaaatataaaaattagttaggtgtggtggtgtatgtttgtagttttagttattagcgaggttgaggtaggagaattatttgaatttcgtaggttgaggttttggtgagttgagattacgttattgtattttagtttgggtaatagaacgagatttcgttttaaaaaaaaaaaaaaaggtaataaaagttttggatagatagggtttttttaggtgagttataatatttgggtaaataaaaatattatgttatttttagaaaaattatagaaatttaatttaattttgttaatatggggatttattattttatttagtaaattaaaggaataataatgtaattgtattttaggtataattggaattagggatttgaatgtaattaagattttttattttttatttttttttttttagattagtttaattttttgtaatatattttttgtatgaattataattatagttatttttagattaatattttttgttagtaaagtaagatagaggtattttttggttatgaagaaaattttagaaaagagttttgaattaaaggttaaaattttggtatatttggtgttgtgtagagttgagagattggttgaagagtgtgttagtagtaagttattttaggtatagggtttgattagaaattaaagattttaatgtagtagtattgtattatttatagtttagattatgttgtaatgatatataattttcgtattttattggtataaattaaaaagattttttttatatgttatttgtttattaggagttgttgagggggttatttggagatttaggttcgttaagtagttattgtttttagtattagttaatgttttgttagtgggtaaagagggagttttggaagaatataaattagtagttaaatttttagtttagaagaaatatatattatttttattaatattttattatagggtatagatgatgataataatgattttttaggtttaaggattttttaattttgagagagggtatttagtggttatttagttattattttgttttttttttaggtagaagtgggtgtggtttttaatatttttagttgtgtttcggttcgtgataataaaatttttgtaatttaaagtttgaagtattttagaggttagaagggtgtttgttgttacgatttttgtttttatttttatttgataagagagaagaatttgtatagattgttagatatgttattattttttgaaagtattaggtatttgggataaggttaatatgtttttttattagaaattatttatagatatgttttttgaggttaggaattttatgaaataaaaataaagaaaattattgagttttttttggatgttagtattatgtttagtgtttttattttttttagtatatttatattattgattattttttattttatttatgattaaagtaagagttgaaggaatgtttttggtttaaggttatattttaggagatatagttagaatttaaatttagtttttttttatttgaaagattgtgttttgtgttggattatattgtatagtttttaaagtgatttaataacgatagtatttattagtgaattttgagtttattaaatagaaattgtttttaatgggtttatttaatggtagggtcggtttaaggtaaaattttttgtttttattttttttttttattcgatacgattttgttgtattatttaggttggattgtagtggcgtggttatagtttattgtagttttaaatttttggtttaaatgattttttttttttatttttttgagtagttgggattatgggcgtatgttattatatttgttaatgtttaaaatttttgtaaagatggggttttattatgttttttaagatggttttaaatttttggttttaagtaatttttttgtcgtaaattttttgaagtgttgggattataggtagaagttataatgtttagtttttttttttttgattaaaaatatatttttttatttttttttattatttaatttttattttaggtttaaggggtatatgtgtaggttcgttatatgggtaaattataatgttgtgggggttgtgtatatagataattttgtcgtttaggtaattagtataatatttaaaaggtagtttttaagtttttattttttttttattttttatttttaagtaggttttggtgtttgttgtttttttgtgtttatgtgtattcgatgtttagtttttatttaaaagtgataatatatagtatttggttttttgtttttgtattaattgttttaaggaatggtttttagttttatttatgttgttgtaaaggatattatgttatttttcgtggttgtgtagtattttattttacggtgtatatgtatatttttttttttttttttttttgagatagtttcgttttgttatttaggttggagtgtaatggcgcgatttcggtttattgtaatttttgttttttaggtttaaacgatttttttgttttgagtagttgggattataggtatttgttattatgtttagttaatttttgtatttttagtagagataaggttttattatgttggttaggttggttttaaatttttgatttcgtcgaattttattcgaatcggttttttaaagtgttaggattataggcgtgagttatcgaatttgggtatttaggttgatttcgtatttttgttattgcgaatagtgtcgtagtgaatatatatgtgcgtgtgtttttaggtagaattatttatatttttttggggatatatttagtaaagggattgttgggttaaacggtagttttaagttttttgagaaatttttagattgttttttataatggttgaattaatttatatttttatttgtagtgtataagtatttttttttttttgtaattttattagtattagttagtttttgatttttttaataatagtttttttgattggtgtaagatggtattttattgtggttttgatttgtatttttttaattagggatattaagtatttttttttttatgttttttttgaaaagtgtttatgttttttgtttattttttaatggggtttttttttgtttattaagttttttatagattttggttattaaatttttgttagatgtatagtttgtagatgtttttttttattttgtaggttgtttattttgttgatagttttattttttgtgtaggagttttttagtttaattaaggtttatttggtaatttttggttttgttgtagttgtttttggagtttttattatgaagtttttgttagggttgatgtttaaaatggtattttttaggtttttttttagtatttttatagttttaggttttatatttaagtttttaatttattttgagttgatttttatatatggcgaaagataggggtttagtgttatttttttgtttatggttatttagttattttagtattatttattgaatagggagttttttttttattgtttgttattgttaattttgttaaagattagatggttttaggtatgtggttttatttttgagttttttaatttgttttattagtttatgtgtttgtttttgtattagtgttatgttgttttagttattgtaattttataatttgaagataggtagtgtgatgtttttagttttgttttttttgtttaggattgttttggttatttgggtttttttttggttttatatgaatttttgaatttttttttttaattttgtgaaaaatgttattggtagtttgatattgaatttgtaaattgttttgattagtatggtagttttaataataatattaattttttttatttaggagtatggaatgtttttttattggtgtaatttgatttttttgggtagtgttttgtaaaatttttattgtagagattgtttatttttttggttagttgtatttttaggtattttattttttttgaggttattgtgaatgaaattgtattttttatttggttttcggtttagatgttattggtgtatagaaatgttattgatttttgtaaatttattttgtattttgaaattttgttgaagtttttttttagatttagaagtttttaggaagagattatggagttttttaggtatagaattattatttatgaagagagataatttgattttttttttttttatttggatgttttttattttttttttttatttgattgttttaaatagaatttttagtattatgttgaataggagtagtgagagtgggtatttttgttttgttttagtttttaaagagaatatttttagtttttgttaatttagtattatgttggttttgggtttgttagagatagtttttattattttgaggattataattttaaatttagtttgttgagggtttttaatatgaatgaatgtttaattttattaaaagttttttttgtatttattaaggtattatgtggtttttgtttttagttttttttatgtgatgaattatatttattgatttgggtaagttgagttaattttgtattttagggataaagtttatttgattataatggattagttttttggtgtgttgttggattttatttggtagtattttgtggaggatttttgtatatatgtttattagggatattggtttgaagttttttttttttgttgtgtttttgttaggttttggtattagaatgatgttggttttatagattgagttagggaggtgttttttttttttaattttttggaatagtttcggtaggaatgatattagtttttttttatatgtttggtagaatttggttgtgaatttatttggtttaggattttttttggttagtaggttttttattattgatttaattttggaatttgttattggtttgtttggggttttaatttttggtttaattttgggaggttgtatgtttttaggaatttatttatttttttaggttttttagtttgtgtgtagaggtgtttataatagtttttaagcggtttttgtatttttgtgtggttagtgataacgttttttttgttatttttgattgtgtttatttagattatttttttttttttttttttattagtttagttagtgtttattaattttatttatttttttaaagaattaatttttgttttttttgattttttgtacggttttttttatttttattttgtttagtttagttttgattttgggtatttttttttgttagttttggggttggtttgtttttgtttatttagtttttttagatgtgatgttaggttgagatttatttttttgatgtgggtatttagtattatagtttttttttaatattgttttagttgtgttttagattttggtatgtttttatttttgtttttattagttgtaaataattttttgatttttgttttaatttttttttgtttatttaagttatttaggagtagattaatttttatttaattatatggttttgagagatttttttggtatttatttttatggtattgtggtttaagagtgtggttggtattttagggtttttttgtttttttgagatgagttttattttgttaattagattggagtgtaatggcgtgattttagtttattgtaattttttttttttaggtttaagtaattttcgtgatttaattttcgaagtagttgggattataggcgtatgttattatgtacggttaatttttatattttttagaagagatgggtttttgttatgttggttaggttggttttaaatttttgattttaagtgatttgtttattttagttttttaaagtgttgggattataggtgtgagttattatatttggtcggtattttaggttttttgaatttgttgagaattgttttttggttaataaagtaattgtggtcgattttaagagtatgtattatgtgtagttgaaaagaatgtatattttgtttttgttggatagagagtgttgttttttgttttttatttgtttgatagatttttttttattttttattttgaggttattggtgtttttgtatatgagatgggttttttgaagatatatagttgggttttgtttttttgtttaatttgttattttttgtttattaattgaggtatttagtttatttatatttaaggttaatattgatatgtgtagatttgattttattattatgttgttatttggttgttatgtagattttattgtttatttgttttatagtgttaatggtttatgtattcgagtatatttttgtgatggttagtattggtttgtatattttagggtggtttaaagtattaggagaaagtatgtaaaatagtttaaggtgaagtttatttggtagttgagagtgagtttatattatgtattttaaaatgaggaggtgtttttttttttttattttaattaaagaagattgagaagttttttagtattttattgtgttttttgttgttttgtatttttcggttattttgtggtagatttttggtatttgaattttttataggtttaggagagaatagtttttttgaggttttaaggatatttgagaattatttttagagttaatggaattttttatattttttgtggattttgattatttattttttttttaatttttgtgagattagagaattgaaagtttgttatattattggaatttagttaaaatgtggtgttttttttaatattgtttaattagaagatgtgggaattttaattgatataagaattaagaaatatgattataaattaaagggaaaataagagaagaatttaaagaatatttgggagttttagggaggttataattgtaatgagttaatgttatttatatgtttaagggaaagtgaatttgaatttatagggtaattttcgtgggttaggtttttttatatataattttaagttatgttaaaatgaatgtatttaaggaaaattttattatatataatttatgataaggaaatttatgtttaggaagattaattaggaggttaaggttattaagtttttagattgtttcgttaggatttaatttaggtttggtttttgtttggttttggagtatgtgttatttttattttattatgttgtttttttaatttgtagtttagtgtttagggtataggggttaggttaagattagaagggatattaatattaataggtttggcgaggtgggaagtatagggaaggggtgattttagtttattttttttttttttttagagggattattagggttattggtattgttgggtgatagaagttgtaaatacggggtaaggtatatggatgatattatttttatatgtgtatgtgatagagtggtaggttagaagttaatagttatatttagggagttaaggatatagtttttagtaacggcgtttgcgttttgtttttagggttgatgaaagaggatggaagttgtattttgtttttttattttaatagaaagtaagttaaaaggagaaattgggagatagaggtttataaaaggaaatttataatggggttatattaagataatttaagagggaaaataagataaggtggttttttttttgaattggtgatataatattaattattgtttttatagagtggttgggtttgattttaattataggagtttagttgtttttattttttgagggtagataggaagtagtggttatgttattgtagtttaatgatttgagattagaattggttattgttttattgtagggtgtgtgtttagtatattttgatagtttttttttttgtttagttttgagaaaaaaataatattaaataaggaaggtgaagttatagaaagttttgattattaaaaaatgttaatatttagggcgaggaaagattttagaaattattttaaattttatgagggtaaattaattgtaagggttattaaggttggtaagtggtagaatatggatgtaaatttagggttttttattttttttttagtgtattttttattatgttaggaggaagggcgaagagtaaaggtgttaggggaagggttgaggtttgtttttttttatttttttattttatagaaaatgaaggatataaatggagtcgaaaatttaggtttttggaagttataggtttgttttagatggatttatttttttttttgggtttagtgaagttatttggttataaagttttaagttatgtatgattataatattttaagaaatagaagttaggtattagaaggtttcgttttttttataaatagtttaaagtattttaatgaagtttaggtatttaaaaaaaaaaatattttaattttaggagtattaagtattatgagtaataaaataaatatttatagtaatgggggttttaggataatttattttttgaatataagtagatatgtttaagaaagttattttaaggatagggttgtatgtacgaagagacgagattaagttaagttttatagttaaaatagatatttttattttttttttagtagtatttgtatagtataaataggtatttgtgaatgaagttatgaaaagatttttaaaggtttgtgttagagtaattgtggttaaaatacgagagtaggaaaagtgagattttttagttaagttattaataatttagatttaagattttttagaaagatgattattttttattttttttaggagttatggttattaatttggagagaggttaaaagatatttaggttttttgtaaattaaagattgaggtatttatattagttagtagtggtttttgtagtagtagttatagaaagtgagtaatggaaataaaaggatagagatatataggaagttttttttttttatttggagaagaaagaagatagtaaaaaaaattaggttaattttataattaaggtagagttgttttaaaatttgaggtagttaatgattaatataaattattttatttttttgagattcggtttttttgtaaaggagaaattatattgattttggattaaaatttttagatagtagacgtgattttggattttaagaaggagtaaattatttttgttaatgtagataaagacgttattatttttggtttttaggattttatagggaaaatagttttattatttggtttttattagttagaggtttagatgattttgtgtttttgagataggatatggtttttttatggttttttatgagaatttgtttagtaataagtgtttttgttgttgttgttgttgtttgttttttagatagttttatttttgttgtttaggttggagtgtaatgatgcgattttagtttattgtaatttttattttttgggtttaagtgttttttttgttttagttttttgagtagttggaattataggtaattttattacgtttagttaattttgtatttttagtagagatggggttttattatgttggttaggttggttttgaatttttgattttaggtgatttgtttatttttgttttttaaagtgttgggattttaggcgtgagttattgtgttcggttataataagtttttaattattagagttagtggtttttgttattgattgagtttattgattggataatgagagggttatatgtggttgtttttagttattatattaaggtgatatttgagtatgatacgaggtttgtattttttataattaattggatttgttttattgttttttattaggagtagaagtatgtttgtgttagtttttaaatattattattttatttttagtttatagtttttttttgtttagattttttattatttaaggtagtaatttttaaatgttagtgtgtataaggatttaaggtatttgtcgaaaatgtagatttttgtattaattttagagaattagaagtaatttttttagggtagagtttgagaatttgttttgaaaaaagattttatatgtttttggataatatttaaagatggttttagaatagtgtttttggaaattttaatacgtaagtaaattaagagtagtttgttaaaatgtagacgtttaaaaatttggtgtaggtttgaaattttgtatttatatgtttttttagagaagttaaagttgttggtttttttggttatattttgagttattagaatttaaaggattttcggtttgtatttgggtttaagagagtaaaagtgttataaatatatatagttttaattttttttgattttttgtggagtagaatttttttttttatttttagttagataggtttttatggataagggggtattgttttgttttgtgtgtttttagtttttttttatggaattttgttttgattttaagtttttattagatttgttattagaagtgttgaatattgattttttgtgagtataaagtagttaaaagaaaaaagaaatatatgtaaggttgtagagtttttatttgtagatattaagaaatgagtatgaattgttaggtattttttaagattgttgtttaaagatttttttaagtttgagattttaaatttttttaggtgatatttatattatttattttttttttttttaaatttagaaagtgagttgtagtaaatttttttttgaaagaattgtaaagatgaatcgtggtttttttttatatttataatttttgttttagggttaaaaagatttttttaaggatagaaaattgtatttaatgatatagtttagagcgtatgttgttttttttgtttatagtattttttatttttggtttaaatgtattttggttattgatgtatttttagtttttatagtttagtaaattatggtgtagtgattacgtttatgtttttatttttttaattaaattttttgagttatgttagggtgaggatgtggttttttttattttgtaatttttaaaagtttgtggtggagtgtagagatgattattaaatgaaagaattattcgtattggttgaaataatattaataaatattttaggttttgtggtgaatatagattagtaaataaatgttgggtaattttttagttttttagtgttttacggtatatttgtttttttatagggagtatagttagagtttttttatttacgttgcggggatattgatttgtatggggaggtttggtgtaaggtttttgttgggtatgagtagtagtataagtttttgaaggttgtgtgttgtttagaatttggagttggttgggggttttcgatgttttgtgttgataagttggtttggggtttttttttattagagttttttttatattttaaggtatgtatatttttttttgggtatataggtaatgggttagataagtattttttttttttaaggtttgttattaagtattttttttttttagggggtggggtttggaaatttttatttaatatagtttattttttgttatttgatattttttaatattggagtggtggtttttaatttttttattattaaggaggtttaattttttttttttttattttaatacggttttaattattaaataggattttttaagtgattatttgtttttttatattgtttattagagagatgtttaagattaatatgaagatgataaagttatattatttgttatttaatattggaaaatatattttattttatattgagattttagtttgggttagttgagttacgggggttgttaaaattttagtaatagtaatagttgtttgttttttatttttttgttatggtatatattttttttttttagaattatattttcgagatatatgatttataattttatggttagaaaaaagaggatatgattattttataggttttttgtttttttgaattattttttttgggtttattaagaataggtatatgaagaaagaaatttagggttgtgttataatcgtataaaaatttgtttatagataatattttaaggaggtagggtttgtttatttgaattattgttgtttatataatgtaatttaattattttgttttgcgtttagttatttaagatttttgtaattagtttttgtggtatgggttgtttttttaattgtattttgattgaattattgggtattatgttagaggagggggatttatttaattttttttttttggtgttttggagtttaggggtttttacgtggtaatgggtgttagatatttttttttagttaggatataggggtttagatttttataatatttatagattgatttatttaaaatttatttgttgttaaaatataaatattttgggtttaggaagaaattaatatttattaagattatgttaaataaaaataattattattaattgaaattatttagttattagatatattatatatattattttatgtaatttttttaataaaatgatgttatttaagagatgagaaattgggatttagattagtgaagttttatggtataagttatataggtaagaaatggtaaagtaaaaatttatatttacgtttttttgggttttgttataacgtatattggtttttttattgtggttattgtttgatagaatgagatttaagtaattataaggatttattagaagggaaaagttgatatgattagaattagaatatagtttagggaatgtaagtttgggtagattatggtattcgaagtttaaggattatttgaaagaggtttaaaaaaataaaaaaaggagtaaaatgtataagtgaaatggaggtgaaatttaattatagtttaatttttattttaaagattgtttagtttattttgggaatgtgaggggaattaagaagattttggataggtttgtaggagaggtaaggtgtgtagggtatatgtggggataaagggagtaattgtattttagattgtatttaataattttttgggataaaagagagtaaatgtagacgtggggaagtagtagtttgagtggtattaggtgttagaaagaagattaagggaaaaatttttgatgattatggggatagtgtaaattgagtagtaagaggaaggaggattgtagaagtttaagaatgatgagaattgaggaaacgaagataaatatagagataaatatagataattttattgtagcgaaagagaagatggtgttatataggtaagtaggattaagaaatggtttttttgttgttgttgttgtttgtttttttttttttttttgattcggagtttcgttttgtagttaggttggagtgtagtggcgtgatttcggtttattgtaattttcgattttttggtttaagttttttgttttagtttttcgagtagttgggattatatgtacgcgttattatgtttggttaatttttgtatttttagtagagatggggttttgttattttggttaggatggtttcgattttttgatttcgtgatttgttcgttttagttttttaaagtgttgggattataggtatgagttatcgtatttggtttggttttttttttttttttttaatggagtgtagttttattgtttaggttggagtatagcgatgcgatttcggtttattgtagtttttgttttttaggtttaagtaatttttttgttttagttttttgagtagttgggattataggtatatattatcgtattagttaatttttgtatatttagtagagatgggggtttcgttatgttggttaggatggtatcgaatttttgattttaggtgatttattcgttttggttttttaaagtgttgggattatagatataagttatcgtgttaggttaagaaatggtttttaaaaatgttgatttgaaagtaaaagagaaggaagtagaggagagatttatgattttaagaaaaaggaggaatatgaaggattaattttgttttttttattagttaaagggtatattttagaaagatggttttaaattttttttttttgtatttgtaagtgtgtaaagatgttatgtttttatttttttagaattggttttttttttttataagttttttatttataattttagtttagtttaatggataaaattatgaggaattttaaatatttttttaaaaagatttagattttatttaagaggtgaaggagaattattaaagatgattgagtaggggaatattatagttagagttttttgttagaaatattattgaggttatataggggaaagattgggagtgtggtaagagagtgagattaaatgtttagataaaggtagggaggtaattgttatagtttagaattgaaataggatagtggaagtggaaatggagggaggggataataaagatatgtttagagatattagaaattgattattaaaataggtatataggaagggaaaatgtattttattaattaagaaagtaatggtatattggatattaatagtaaatagtaaagaaatggttgtgtgggtgtgtgtgtttttttttaagggaaaaaaatgaggataaagggaagagaaagtgatgttattaattttttatgtaatgataatttttaaatagttttttttagtagttttatatttaagggttaggatttttatttagggatttttttgtggtgttttaaaggggtagattgaggattttaagggttattatttttaggtggttttttaagtagtagaattcgtgggatgaggaggatatgtttgttttttatagatttattgaagtgaatttgggggttgatcgatgataatattgtgttgattttagagatgataaaggggttgagtgtgagataatggagtttttgaaatttttacgatgaatatgtttattttttttttttattagttgttagtttttattttattttttttttgttttaattttattatttttaaatttgagtttaggtttgttagtatttttaggagtaaattataagattgagattagagtaataagaaaagtagagataaatgatttaataagatagttataggaggtagggtaaggtggtttacgtttgtaattttagtattttggaaggtcgaggtaggtagattacgaggtcgagattgagattattttggttaacgtggtgaaattttgtttttattaaaaatataaaaattagttgggtatggtggtatgtgtttgtagttttagttattgggaggttgaggtagaagaattatttgaatttatgatgcggaggttgtagtgagtcgagattatgttattgtattttagtttggcgatagagtaagataatgttaaaaaaaaaaaaaaaaaaaaaaaaaaaaagatagttaaaggaaagggattagaagagagaggaatgtaaaagaatagaaaatttgggttaggtgtagtggtttatgtttgtaattttagtattttggaaggtcgaggtaggtagattgtttgaatttaggagttcgagattagtttaggtaatatggtaaaattttatataaatataaatataaaacgttagttgggtatgttggtgtatgtttatagttttagttatttgggaggttgaggtattagaattatttgaacgcgggaggcggtagagattgtagtgagttgagaatttattattgtattattgtattcgagtttgggtaatagaataaggttttgttttaaaaaaaaaaaaaaaaaaaaaaaagaatagaaaattaaattttaatattattatttgggtagttttttttatttttttatgatttttaataagttattagtagattatttattatttttttaatttttttaaaaataaataaaattttaaatttgtatttgggaaattgagaaatttttaggaaatatagaaatatatttttaggattttggatagtagaaaaaggattatttcgtatatatttcgattttatttcggtttttttataatatatgatatttacgttagtaagattgttgaggaaatgtgatattttaatatgttgatgagggaaaggataaataaagggttatatagttattaatggagagtgtttagggaaggtatgaagatttaggttataatagttaagaggagttttgggttttatagaatgtttagtttaattttttaatattttgagttagagaaggatattttttatatttatattataatttttttttttagatattgatttttaaaagaatatatagaatagaatattgatattgagattttttttaattttttggggaaaaatgtataaaaatataatttgtagtttacggatttagaaatagttttataaatgataaagaaaattttataaaggtaaaatattttattaaggtagagtaatataagagttgttgatttagtattagtttttggatattttgatttttgtgtagtgtttttttttttgtagttggtaagtggttaaagatttggattttttttttagttttgttatatattagatgtgtgatttttggtaaattatttaattatgttgagttttgggttttttttttgaattgagtttttatttttattttatacgttaggtattattagggaatgaaaaataaaattaatttttatgttaaagtagttttttagtgtagtatagtttagatatgaaaatattaataatttaataatattagttaaatatataaaagtagtatagagaaaaatattaataatttgatatttagagtaagattaggagggttttataatataagtaaagggaaatttaggaagaagaaatagtaaaagtattaagcggtgtaataagatattagatttaggaaattattaataatttagttttgatggatggtaatggtggtggggagagatatggggtaatgaaatttattatatattgatgttgtggaagtttaatgagttattatagataattattagttattattatgttaatagttatttttatgagaaaaaaattttttaatttaatatttatagaaaatttttgtttgttttttatattaggggtagttttttttggtttttttttaaagaaatagagttagtttgagaaataggaaaattaagttttatatttttttagtttatgaaatattagttaagaggtaaaagtgttttttttgttaatattttgatttttttattgaaatgttatttagtagagtatattttttatttgtgcgatttgaaaataaggttttgtttaaagattagggtatgtaagggattatttttgggacgattttatggtattgagtatttaagtaaggtggtaatataagagttagatttgataaaagtttattttttaggattatttgataataagggtatagaaaagtgttttgaggaataatttttatgttattattatttttaattttttgtatttaatattaatttttttagttttttataattagatatgtatatatgagttagtagtagttatagttttataatttgattagtttatgtttaattgtatgtttgtattagggatatttggttattgtagtgttatggaaatttttttttttggtgaagagtatttagagatatttatgagttttattatttatattttgtattggtttgaatagtgttttttaaatttatgtttatttagaattttagaatgtaattttatttggaaatagggtttttgaaaatataattaagttaagatgaggttatattgaattaagggtggatttttaatttaatgattagtttttttgtaagagggatatttggatgtaaagagatttatttatagagaatgtgatgtgatgatggagggagagattgtagtgataagtttataagttaaagaatgttaaagattgtcggtaaatgttaaaagttaggagagaggtatgaaatagatgtttttttagattttttaggaggaattaatttggttgatatttggattttagatttttggtttttagaattttgattaaattaatttttgttgttttaaattatttagtttttggtagtttgttaaagtagttttaggaaataaatgtatattattattattttatttattttttttttatgtgtttaatatttatttttttagaggatgattataaattttagttattgtattaatatacgggaagggatattgagtagaatagtaggagaatgaataattagtattagattagtaattttataggtaaggtaaagggtatgggaatttattttttaaggttttataatatgagattttttaaaaattttgtggtgtttttatatatatttataagttttgtgatatgttttttttgaaaaaggtagagtttaatttttttttttttgagtgtggttagtgttcgatgatttgtttttaataaatagaagtgatagatgtgatttttgaaattaggttattaaaaataatgtagttttttttttgttttcgtttttaaattatttgttttgggggatgttagtagttatgttatgaagatattttaaaaggagatttatgtgataggaaatatattttttgttttaggtatatttagtatattttgttaggtatatgagtgagttattttggaagaggattttttagttttgtttatatttttagaattgtagttttagttgatatcgattggaattatattagattttgagttagagttatttagttatgttatttttagatttttaattacgtaaattgtgagataatataagtttattgtttttaattattaatttttggagaaaaatagggtaatagataattaatataagaatttttaatatagtttttaagttttagtaagtattttttttgtttataagatattcgttatgtgatttttttttgtttttaatatatttttgaaataagtgtaattttaaattttttaatttaagttagagtatagaatttataggatcgttgtttttgtttttttttagtttagagattgatgtttatattatgaatgcgttaagaaagggagaattacgagtggaatttagtattagtagttgggagtaaaagatatttgcggtaagggttttcgggttttttattgtaagatttttatttgttaaaaaaattaaaatggaaaagaaaatttaattatttgaaataaatatttattgagtatttttaatggtaagtatagtattagatagtaggtataaaaatggtttttgtttagaaatttataggaatgataaataggttttgtaatagaagttattgttgtattatttatatttttttagattaagatttggttatagaatttgtgaatttttgtgtaaaataaaaacgtggggttttttgtttaagaattttaagaggatagtagtagattagtaaattaattttataggtatatgtttatgaagttagttttgttttaggtatttatttttgtgtgaaggttattaattgtttttttagtaagtttttttttggttgatttggatgtttaatttgtattaagggaaagtttaatatttttgaaagtagtatttaattaacggtaaaatggtagttggtagataaatgttttagttttttttttttttgggtggtataattgagaattattttagtgttgagttttttagtgggattgagatgtaagtgtttatagtgtaattgggagattttttaagattatttttaaaataaattatttatatttatatttttattttatagtttgttttttggtaaatttaaattatgatattttttattttttaagttaattttaatttggaatatagtaaaatgaaaaaaatttaaagttgtattttatttaataggaatgaatgtaatatagtaacgttggtttttattatggtaaggaaagtggtggttttttaaatttgaatggtgaaagattttgtgtttggattttgagataaaaagttgttaatgaaggttgttaagtagtagttatagggttttattttagagttattttttttcgtaatgtataagtggattaaagtgtggtaaggttgaaggtaggaaaattaattaggaaatgagaaattcgtaattggtaaataggataggatatttatttggatgattatttatattattgattaaaatggagaaagtatattaagttgttaagaataaattaatttgtgttatataagtggttataagtattgggattatttatttattgagtttttgaatttaattagtaaggagtgggaaatgaagaaggttaaggggtcgatgatgagtattgggaattgatggttttttttgatattaagattaaattaggaatacgaagtattaataatgttgtcgtatttattattgatttttattacggagtgtttagtaaaattaaaataagaatttgtattttaaagatgatattatatgggtttattgaatattaattttacgattttttaggaatttagagatgattattttatgagatattgaaatggtgtttagtttggtaaggtagaagtttgtttttttgatatgtgatggttttgttgtaggtagttttggattaaaatgttgttagtaatatagatttttttagtgtttttgttttggaatttttaaggtagtggtttttaaagtttgttgtatattggaattatttgatttttttaaataatgatgtttggtttttattttgagatatttttatttgattggtatatatggtgtgatttgggaatcgggatttttaaaagttttttagttaattttaatgtgtagtaaagtttggaggtgattattttaaggaattgggtttattatagggtttgatagggtttatcgttatatttgtattgtattttaaatagtgggataaagtaaggggtatgaattagaagttgtatatattatttttgtttatttttattggttagttatatggttatatttggttgtataagatgttgaaaaatgtaatttgtatttagttagttatgtgtttagttaaaattttttatttaggaagaagaggaagataggtattggaagataattagtaattttttttatttttacgtttgttttttttaaatagaagtagtttaatttggtaaaagtatcgatttttagatttggagataaaatttaataacgggtttttttgatttttgttagatattttgtatattatatgtagatagagttagagattgtaacgtattattgttagcgggaagaagatataagtttggagatatgtattagaatgattatttatgtaaatttttgaatttttatttgagggaggtgttggaggaataaattgttttacgggataaaattaggtgtaatattaaaattttatgtatttattttagttgattgaatatagtgaagtatttttagtataataatataggaaaattttaaataaaggggtattttttaaattttattaaatatattatttttggtttgaaattattttgttaagttatttgttgagattttttattttagatatgtttggtgttgtttttgtatttaagttttgttttttagacgaaatatagatataatttaattgtaattttattattatgtattttggatgttgtagttagtttaaatgaaataaaatatattaattatgagtgatagtgatttttttaatcgtaaaacgtattattaagttatttataagtaaattttatattataaataaggtattaattaaattattgttttatagaaaattatttaatgatattttagtattatatattgtttatagattaaaaatttaagtttaaaaaggtaatttgtttgaagttatatagttagtaaattattagttataatttaattaagagtatattgaattaagttataattagtaaaggattaaatttttagatttgaatttttgatggtttgattttaaaaatattttatttttaaaattatagtacggagtattttgtatattatgatatagttatattattttgtagggtttttatgtttaagttattttttttttttgttttatttttatttttttatttattttttttttttttagtagataaagtttttatttgtttgttagtttttaattttatgtatgtaattattttatggaaggacggaaggggggtagggaagaggggattttttagtttattattttttaatatatttttgtagagtttaggtttttttaggtattttagttatagttatattaagtttttagttattgtttagtatatatttattatttggtttttttgtgttttttatttgtaattttggattttagtttagtttagatatttttttaatttatattaagtatttattttttttttgatatttttgtttttggttttttttttgttttatttatttggatatttatttttaagtaaaatattttaaattttatttttattattttattttttagtttagattattagaagttttttattattaatataaattggaaaatttttggtgtgattatgaggagattatttagtattttttttgatattattaaataatattgagtttgtttaatgttagtattaaaggttaggttgtaaaatagtaaaatttgtagtggtttttaaggtaattagttgtttattatagtagttggggaaaggaagatataaaaaattttttaaggaattttattatagatttgtttatttaggtaaagtatatataggaagatgcgggaattataataaatgtttatgaagtaaaattaaatgtatttgtattgttatatttagatttatatataaacgataaagagtttatatttagattgtatgtgtttgtttttgtattgttataaagaaatatttgagattgggtagtttagtttataaagaaaagaggtttaattggtttacggttttgtagttcgtataggaagtatagtggtttttgtttttgaggaggttttaggaaatttataattatggtcgaaggtgaatagaaagtaggtatattttaaatgataggagtaggagtaagagagagagtggggaggtgttatatatttaaataattagattttataagaatttattattataagaatagtatttagggggaaatttatttttaggatttaattattttttattaggttttatttttaatattggggatttttattcgatatgagatttgggaagggatataaatttatattatagattgtataaagaatttttttagtttaggcgtagtggtttatgtttgtaattttagggttttgggaggttaaggtgggaagagtgtttgaggttaggagtttgagatcggtttgggtaatatagtaagattttgtttttataatagaaaaaaaaaaaaaaaaaaaaggaatttttttaggtacgggggatgttgaatatagagttaagggtgattattttttagttttgagatttaatgtttgtttttttaggttttggatttgtttggggtttattaatttttttttttggtttatttttttttttttaaatgggaatgtttattttatgttcgttttgtcgttgtattttagaagtagataatttgttttgattttatagatggaattttggatttttgagttgatgttgaaataagttaggattttggggatatggggattaagtatagttgtatgtgagaagaatatgggtttgggggattataggtagaatgtaatggtttgaatgtttgttttttttaaaatttatgttgaaatttaatttttaatgtggtagtattgataggtggggtttttaagagatgtttatggattaatgggttattatgggagttagattagtggttttataagaggaaaagaggttttagttagtatgttttgtttttttgttatgtgatgttttatattattttaggattttgtagagtttttatgagtaaggaggttttgattagatgtatttttttgattttggattttttagtttttggaattgttagaaatgaatgttattttttttttaaaaaataaataaaaaatttttttataagaaaaagattgatgatttaatggaaaaatgtgagtagaatagatgttttagaatagagaatattaaatggtttataaatataggataatatatattatttgatttgtaattatggaaaatatttagtaaaaatggttaaaatttaaaagtttgaaaatattaagtattgagagaatgtgaagtaatagggattttgtattgtttggtggagttgttgtgagttgatattagggagaatgaatggatttgggaatagagattaatatgtaaatagttttttttgatattgaaagggtttgtttaggtgcgagtatattttgggtttaataagggagggtaagaaaaaataatagttttttttggtgggtgtagattttaggtagataaagaaattttaatttatttgagagaggaggtaggggatggggaggttatagagaattttgggtttttttagtttattatgttatagtattatattttcgggtatgagttttgagttttataatggttataagtatttaattatagatttagtgacgtatgtataaaatatatattagattttaaagatttagtatataaaagaatataaaatattttatttgtaattgtttaaaattgattatatgttaaaatgataatattttaaatataatgggttaggttggtaaaataaaatatattattaaagttaattttaattgtttttttttattttttttaatgtagttataattagaaaattataaattatataagcggtttgtattatatttttttttttgagatagagttttgatgttatttagtttggagtatagtcgcgcgatttgggtttattgtaatttttgtttttcgggtttaagcgatttttttgttttagttttttaagtagttggaatgaattataggtatgagttattaggtttggttaatttttttgtatttttagtagagatgaggttttgttatgttggttaggttggttttaaatttttgattttaagtgattaatttgttttggttttttaaagtattggtattatagacgtgagttatcgtatttggttcgtttttattatatttttattggatagtattgttttggagaaaaattaagattttttttttataggatatttttaaaaaatatttaaatgtaaggaataaaaaatattgtaagaaatcgaagaaagtaaattagaatttggaggttaggatggattttttaatgaggataggtaggggtgtgtgtgtgtgtgtgcgtttgtatgtatggatatacggatagggtaagtatatatatatgtgtgtatatgtatgagattgataaataatttaataggaaaaatgggtaaaggatagaattgaaaatgtatagaaaatttgaatggtaaatagtaatataattaaaattattaaaggaagagaaaattaaaagtaattaagatttttttttattggttgggaaaaaaataaaaatataaataatatgtatttttgttgggtaagtgggaagggagtaggattatatattgttgtaaggaaatgtaaaggttaatagtttattgagaaagtaatatggtaatatttattaaattagaaatatgttatatttttcgatttagaaattttttttataaaaatttattagtatatgatatgtgtttagaaagttattattgtaatattgtgtagtagaaaaaaagaggaaattaagtattaataggaaatgaagtaaatgtttatttattgataaaaggttaaaaatattatttgtaaaataagatttgttatggaattattaaggattataaataaaaatattagtaaatttttaaaaatatgaaaatattaggaatggtattattgtaggaaaatagattatagtagtttttttttatttttgggagatatgttttaagattttcggtggatgtttgaaattattgatagtattgaattcgattgttgttaataggaagttttttttggtgatgttttttatttataattttaatgatttttttattttaattaagtgtttaatatgtattgtggttgtaatttttttattttgaagtgtgatagtaaaattagtaaaaatttttttttttttttttataattttagggatagaagatttgttttgattatggattttagtaaatttagtatttaaaaaatttttttaagttaagaatttttatttttttatttaaaagaagtattttatggttttttttttgtatatttaagttgttattattagtatttttgtattttggggttattgttatgtaaaataagggttttatgaatataagtattgtgatatttaggtagtaaaattgataagaaggttattaagtgattaataggtaggttgtatatatattgtggatattgggtaaagggatgatgtaaattttggggagggatggagtggtatggtatgagattttattatgtttattagaatggtgtagcgtttaatttaaaataggaattgtttaggtgttaatttaaaatttaggaattatttttgatattttttatttaaaatatttagattgtggttgttaagagtaatgaaattttgagaaatgaaatcgaggataaggggaggattattgtattttatgatatgttggtgtggataaaaataggtgtaattttattgaagttgattatgaggttgattatttgttgattattgaataggttttatagataaaagtttttgatttgaggaatttcgaagggaataaagattatttggtgattattaaacgggttagatagaggcgaaattttttttttgggaatttagaagtaattaaatttttttagtatttaaagtttggttttaggttttttttaatttttataagtaattaaaatttatatatatttttgaaatgttatgtcgaaattttttttattattttaagtttttgttttaaggtttataaatatttttaaagaaaaatttatggtagtatatttagtttttttgttgaggcgttttattgtatttttttgtagtgttttgttatcgtttaaggggtttattttgtttatgtttagatagagttaatttatcgagataggggaattgtgatagagaaagagtattttacgtagaattagttgtgtgggagattagttttttcgagtacgggggagtagagttttaaaagataatttcgtgggtggggggaagttagtgagttagaagtgttgattggttagggatgaaattgtagggaattaaaatcgtttttttgtattgagttagtttttgggtgggggttatataattagatgagttattttgggtagttaaagtgagtggattatcggaggtcgggaattggaaattagtttggttaatattgtgaaattttgtttttattaaaaaataaaaaaaaaaaaataaatagaaaaagttaggcgtgatggtaggtgtttgtaattttagttattcgagaggttgagataggagaattatttgaattcgggaggcggaggttgtagtgagtcgagatcgtgttatttgtattttagtttgggcgataagagtaagatttcgtttttaaaaaaaaaaaaaaaaaaaaaaaagagttagtttattgatgtgggtagtgttagttgatttattaagtacggggtttgtaaaatattttaagtattgattataggagtagtttagggagggttagaattttgtagtttttagttgtatgattattaaattaaaaattttaattttgtggttaatgttagtttagtttttagataagaaggaagtttgttttgggaaagggttgttattttttttgtttataaattaagttttttttaaagttagtttagtttacgtttaggaatgaataagaatagtttggagtttagaagtaagatggagtcggttacgttagattttttttattgttttagttattattttgtaaaggttgttttagttttttttttttaataaatttttttttttttaaatttatattgtttgtaggtatggtaaatttattttattaatttgcgagttgattatttttcggtgttagggttttgatattttgttaggtatttacggaaagataattgtaaaaatttaatagaattttaaatttttatgttttcgaatttagtagttaaatttttagaaatttattttattaatataatggtacgacgatttaaagagatatgtataaggatgttttcgatagtttttatttaataagatgtggaaagaattttaaatgtttatttaaaattgttgaataaattatatgtttataaaatgaataatgtagattttaaaaagagtgaggtagttttatgttattaaattggaataataaaagttattataaagtataaaaagtaagttgaagattgtttttatgtttgaaattttttataataaaaaatgaaaaaaatggagggggattagatatattgtttttttatgagtaagaattttataagttttggataattaaatttcgtttttattttttttattttattatatttgattttaattagttttttatttatattgtttatatgtttatttgttttatatgatttagttattttaagattgtttttgtttttttttattgatataaaaatattaaaaatgtatatttaaaatttgtttaattatattttattattatagtttatttttgtatatttttgtgttgaaaattttttggtataaattaatattaaaattcggtgttattttattttttttgaattgtaattttttttaaataaggaatatatttttttttgtttagagaatatacgtatatttataaattttggtaatttttaaaggttataataaatttgtgttaagaatttagattttttttattattgtggtaaatagatagatgaaattaagagattatagtttgtttttatttttttttaattattatcgtttgaaaaatatcggatattttattattattttgttcggagtcggtaaattacggtttattatttgttttcgtatacgttaaaagttaagaatggtttttatatttttaaatgattggggagggagggttagaatttaaggggagtatttaatgatatttgaaaatgttattaaatttaaattttagtatttataataaagttttattggaatatagttatgtttatttagtttttgtttgtttttggagatagagtttcgttttgtcgtttaggttggagtgtagtggcgagatttcggtttattgtaatttttgttttttgtttttaagttatttttttgttttcgttttttaggtagttgggattataggtgcgcgttatacgcgttatacgttcggttaatttttgtttttattaaaaagtagagatagggtttcgttatgttggttaggttggttttaaatttttgattttaggtgatttattcgtttcggttttttaaagtgataggattataggcgtgagttatcgcgtttagtttttatttagtattgtttaatgatgtttttatattgtaaggagaaagttgagtatggattataaggttaaaaagatgttttttttggttttttatagtaaagatttgttaagttttgttatatgttatattatttgcgttttataattttatagttttatttagatagttttttttttttttttttatatttagtataaaatttttttaatattagtttttaggtaagtatattttttatagtttttagaattggatttttttttgttaatttttttagtttaattatattttttttggttatttataaatagaaagttagaaaggagggttattaatattttaagcgttataaattaataaattaaaattaaattttttttttttttcgaagttacggttaaggaggtttattgtttagttagtggtttttaaattatttttataagtgagatattttgtgaattagaataagtgttgttgttaaaatttttaacggttatatagtaatgtgaaaaaaggtattaaatgtaatttttttaaatttaattttttttaatttttggtataaaaaaaggaatagtaaaggtagataattgtaattagtatgtgtgattttaaatttttatattttagatattggattatatttttagtaagtaaatagtttttggtttttaagatgagaggttaaataatgtagggtgtttgtaaatagtagtataatttatatcggaaattagggtttttttttatcgaggagagtatagtaaaatttgtttattttttttaatgaatattttttatgattagtgttggcggcggggaggcggataagttattttttttattagtcgtgttatattttttttagtattaattttttttttttagtttttttatatttttatttattattagtttttttttagttttattattttttttcgggttttttatattttttttagtatatttttttttagttttattattttatttattttttttaaaattattgatttgttaagtttttagtagtaggcgggtaaagtagggaggttgtaatgtaaaagttcgtagtttttatataaatattatttgtttttgcggagaaatttaagttatagttttagaagtggaaagaataggttttggtttttatttagttaataagcgtttatttagcgtacgtgttgcggtcggattttatgcgaaggagttaaggatataaaggtgagtagtagagacgcggttttagttttttttcggtttttattttagcgggataggtagataatttcggtaaatttcgttaagtaggggtaggataaagagtatttgaagtttatcgcggggagaatttatttaatttttgaatgttaaaaggttaaaaattttattagtcggaagtgacgtgttagtttagtttcgtaggttcgttacgtaattggtcgtcgttatagttagttattttttttttagattggttcgaagagaggaaaagtgtggaagtttataagtcgttttcgtttcgtttttttcgtcgatttttagttgtatcgggaggcggcggcgtttggttagagtcggggtttggagtttggattagatagtttcgtcggtcggggcgttagtttagcgttttgcgggtaatgggttttagcgttcgagtacgcgtatgcgcgggtttgtatttttagaggatttttcgggttatttggacgttagtattttagttatttgtttttttgggtttttttttgtttttgattttttttgttgttttttatcgttagttttttttttttttttttcgtaggtattattagattcggtcgcggtcgttcgtcgatattttagtttttattgatacgagtttcggcgcggttttcgttttcggcgagtattgtgtgtcgcgtcgcggggcgggggcgaggggaggaggaaggagggaggtagcgtttcggcggtttcgcgtttcgtattttcggattcgaagtcgggaaggtaggtgttgtttcgtcgtcgcgttcgagtttggggtttgcgttcgtcggtcggtttcgtaagtcgcgttttagcgtttcgcgattgcgttatcggtttttcgtacgtaattatagttgttttcgttcgtttcgggttcgggcggacgttttgtcgtttcggcgacgttagcgcgttcggcgttgtttggttatttcgtcgttttttcgtttcgttgttgtttattttttcgggtgaaattttgacgtagttatcgcgggtttcggtagcgttatagcggcgggtattttatttgtacgttatattttttttttatttggatacgtatttttttttattttgttagttacgacgtttttttttttttttttttaatgtttagttttagatttggcggaagaagatggagaacgggggtgggatagagttgtggataattttttaggagagggtcgtaaggtgggattttgaatagtggtagaaataaaatgagattgtttttgaagtttgttttttagttgagatataaggagtagaggaagaggaaggattaacgtagaggtatttaaggttttattatgattgtagttgagagttttttttttttttttttaattttttttttattttttttattatttttttgttagtttagattcgttttggtgttttattgtgtatatagttttattcgttttaggtgaggaggttatttaatttgtaaaagattgaggaaggggtaggattattataagttaaagttggatttttatagatagaaattatttgattgaattttttttttattgttgatagaagaaatttaaatttaaagaagttattagtttttattttaaattaaatatatttgtgtgtgttaataatatatataggaataattgttgttaatttattttattatatggttatttattttttagtatatagatttattaaatttttttttttttagtaggtttttggagaaggatgggggtcgggaggagaaaaggttatggggatagttaaattaatttatttatggttaaaagtatggatgttttaaggatggagtagggggttagttttgtgttttataaattttttttatgtatttttaatttttttgaggttgcgtttgagggagattttattgttttttttgtgttttttaattcgtaattattttaggatttataagttggagatatattatgtttagggtgttagttattaatagttatattgaaagattttagttattataaatagattcgttgttttttttttaagaagttgttggtttgagtttagtaatatttaatatggttgttataatttattagtttttagtagttttgagtgtttagatgaatataagagaaatggaatgttgcgtgaaatgttattttaagaagagagtagattttttttaggttagtttgatggataaaaggaagaataattttagatttttttgaaaagaggaggttgtttttgttttatttattttatttgttagtttttagagtagtggtatttaatttttttaatatgaggattttttttgtttatttgtggtggttgataaaaattatgtatggattttttgtggtggtgatagaataaaagttatgtatggatttttttttttttaagtttattagttgttattagtgttaatgtattttatgtttggtttaagatattttttttagtgggtttagggaagttaaaaggttggatattgtgatttagaagaatgagagaatagtgttagagaattaagtttagattttagtggattaattataaagtttttataatattaaattttaaaatatggttaatttaagaaatgttaatatttttatgatattttttattttttagattttttttttgtttgttagaaacgtatgttaaacgaggatatagtgtttggaattattggttttaagatataagtggaatgagtttggattaggagaagtatgttgagttagagttgaaggaagtttttttttttaataagagaaagtagaggtaagagataagatagattaattgggggttgtgtgttagtttattaataagaaaaaaaaggttgatggttgggagttataagttttgaaaatggagaaataaagaggttgaattgattggaagagaagatggagaataataagaaggggtaaatttggagttaggatttaatatagggataaatgtcgggttagggatgtaaaaaaaaaaaaaagaaaaaatttttaattaatatttttattttttttgtttttttttttatttttaagttaaattatggtagagataagtttgttagaggttggggtttttgtagtttttatagttgcggttttggagaatttataggtggaggcgagttgttttgtgtgtttggagtatttgaaggaatttgttattattgagtgtgggtataatttttgtaaagtttgtattattcgttggtgggaggatttagagagggattttttttgttttgtttgtcgaaagatatttcgttatcgtagttttcgatttaatcggtaattaggtagtatggtggaaattgttaagtagttttaggtcgttaagcggaagattcgggatgagagtttttgtttttaatattatgaggtttttagttttttttgttatgaggattaggaggttgtatgtttgatatgtgtaattttttatatttatcgggtttatatcgttgtgttattggacgatgttatataggagtataaggtggggaagtagatatacgatgttagtgtgggtaaaaagggagaagcggtagaggatgagatattttttaggtagagatcgtaagtttttattatttattttgtatttttagagttgtatatgtaggggtatatagtatgtgtgattagttgttttttagtttgaaaaagagtaatggtgagaagtgttttaaaatttttttttgatttttgtaatatatgtgagttttatgggtgaatattggtatgtgtggttatattttttataaatgaatgaaattatatggaaaagattaaatttaggaagaattgaaaagtagtttggtttttttattttgtttgtttgtttagaatgttttttgtttttatattggttattgggtataggtaatatcgtttgagattgatatttatcggattaagttgaattatttaattgtttgtagtttttttaggtaatgggtaatatggtatattatttaatttattgttgagataaaggaaaatgtttgaataaagggaatagagatatgaatgtgttagtattttattatatattttgtttagttatgttatttttgaaaataagattttaggtaatttatagtataataattatgtttttattgtaggtggatagaggtggatgggaggataggtttaaagagagatattagggtatagaaggttgtttggatggtaataggtagttgttttagtaagaaaatggaaagagttgagaaaggatatagagttgatgatagttattttagatttagtaaaaggatagttgggtgagtagagaaggtgatgtggataggttagtggtaggaggagggattgtagaaagttgatattttaaatgataggtaaggaaggaagttagattaagaggtagtaagatggttaggaagtaaataaatggtttaaaataaatggtttaatttttgaatggtaggtatattagttaattttaaatgttattttttttattttttttttattttttaggaaaaattgtagaagtgtttggagtttttggaatagaagttgtaggagattattcgttgtaagttttttgaggagaagaagtttggtgagtttaaggtaaaggtaggtaattttatgtaggttgttttgaagggtatttgtttatgagggaattaattgtatattatttaatttattagtttcggtttattagaaaaatgtagttttcgtcggatatggtggtttatatttgtaattttagtaattttggaggttaaggtgggtagattgtttgagtttaggagtttgagattattttgggtaatatggtgaaattttgtttttattaaaaataaaaaattagtcgggtatggtggtatatgtttgtagttttagcgatttgggcggttgaggtaggagaattgtttgaatttgggaggcggaggttgtagtgagttaagattatattattgtattttagtttgggtaatagagtaaggttttgttttaaataaataaaaaaaataaaaaaaaaaaaaagaaagaataatgtagtttttttaaaaatgatggtattttattaggtttgattgttattaaatattgtatttaaattatttgttatgaattaagtattaagagggatttaagagatgaagaatagatagaatattttatatttggtgagttgagagagttcgtgttttttggttttttttttttgttaaagtagtaaaggaggttttttgttgagaaggtagggatgggagttttttagaggatttgaagagaggagaatatggaagatttattggggagaaagggaaaaggagttgattaagagttttagaagaattatttaatgatattaggattatatttttaaaatttaagtaagtttatatatgttagaatgttttttttttttttattttttattataggattttatttattttttaggcgggatgaaagttattttttatgtagttttttttgattttttagaaattaatatttttaatttttatataattttgtattttttttatagtattgttttatttgtagtatggtattttggtgtttgtttgttttttattgaatagtgaataattattatttgtagtaaaaataattagaattgagttttatgtattaatttattaggtattcgtaatattttagatttatagggttgttagggttttagagtttaggttaaattgggataagtgagatatagaaaagttacgagaaagagatagaaggaaattttgaggttatttttagtaagatgtaggggtaaatttagatattttttaaggtaggtattattatttttagtttatatagaaggaaatggattttgggtaagtgattagtttaagattataaagttagtaagtggtaaaattaggaatattagtttttcgtgaattagtaaatatttgttaagtttttggtttaggttaaattcggtatttgatattggggaataatgatgagtaaaaatatagtttttgttttttttgagtttaaagttaagtggagaaaataagtaatggtataaaatgtatagttgtaagtttataagaagataatatagaaatttggttttattaaaggtttttcgaagaagtaatgagtttttaagagttgatatgtagagattattagaagttaaatttaagttttgatttatagaaatatgaatttttaaatgaatgataatattttattagaaagtaagtattattattttagtgttttatatattttagtaaagtaagtatttgaaattttaaaatttgaattaattttggttagaaatgtgaatttttaaagttttttgtttttttagaggttttttaagaaatttaaaaatatgaaaatggtgtttattgttagttattaatttttttttttatgttgattatttttttgaaggtaaaggatggagagagaaatatatttttttaaaattttttaaatgtttgaatagaattgttttgttttttaaattgtaaattgttattttagtggtttttaaaattattattaatattttttttgtgattatttgaatttttttttttttttttttattagatttaatgtttttttaaaaaataatttgtaattatgttgaattgaaaattataggtaatataatttatgtgtataatgttaaattttaaagagtttattatgtttaaatataatataatgaaatataattgatgataaaatgtggtatgtaatatttgggtatgattattttgaacgattttatagtgtagttggttatatgtttgtttttatatgtgttattattagtaacgttataaatataaatttagattgagatggatgtgtgttaatatgattgaaatattataagtagtttagtttttggtgatatgattttttatagtaataatttttggtaaagttttaagtataataatataattttgggttttatttagttattgttgaaaaatttacgtatagtaaaattatgtaagaattattttgtgtttatattatataaaatggtatttaagtttaggtttatgtttttgtttttgtggtttttttttttttttttttttgagacggcgtttcgttttgttatttaggttggagtgtagtggtgttatttcggtttattgtaagttttgtttttcggatttatgttatttttttgttttagttttttaagtatttgggattataggcgtttattattatatttagttgattttttttttttatttttagtagagatagggttttatcgtgttatttaggatggtttcgattttttgattttgtgatttgtttatttcggttttttaaagtgttgggattataggcgtgagttatcgtgtttggtcgtttaggtttgtgtttttgaatatttagtagaatattagaaaatgttgtaggttagtttattatgtcggattgttttatatattggaggagtgtttgcgttattgttaggaatttttttaattatggaaaataagaagatgtgtttatttttaaaatatttttagagtgtgttaatagttttattaagaattattgttttaaaatatagagtgaaaaaaagagaaaagattatcggtttataagaggaagggtttttttgttttttatttattatagttatgaatgttaaatttatatttatatttaaataaatatatatgtatgtatatatatgtgtaaatatatatatataaaggttgtgttttattgagggtaaatgtgagaatatattttgtttagatgtatattgagaaggtagtggtggaaagtgaagtagtaagtggttttaaattagaagagttagttagtttttgttaggaattagtttgaatttataaatgttacgtttgttaggtttattttggttttgtatttttattttttttttatttttaagtttgttttttattttttatttatttttttttagagttttagtttttgttttttattttgttttattattagttatatgatgtttggggaattttttttttagggagattattatttgttgtagtggagatgtagaagagaggatgtgttgataatttttagaaagtgttatggttggtgtttgagttttatattattaaattttaggaatgttagaggtttaagtttgtgtgttggtttaaagaaagtatgttttaaattttaagaaattaaattattaataaatttttgtaatttgtttttggggtaggaattgttagttttttgaagtgatttgaaataatttaataagtttagttttgaaatttatatatgtatattttataataatttatataatttttattgatttttatatttttttagttttttggtttttatttggtgtatgtgttgtaatatgtaaaggatgataattttatttttaattttttattatttgtatttttttttttgtttcgttgttttttgtttgtttgttttgagatagaattttatttatttaggttggagggtagtagtgattatagtatattaatttaaattttagtgtttaggttatttatttttttgattttttttgagtagttaggattgtagatgtgtattgttatgttcgattaatttttttttttttttagttgaaataaggttttattatgttttttaggttggttttggttttaagtgatttttttatttgggttttttaagtattaagtttataggtatgagttattatgttgagtttatattttttttttttcgatagattgaattaattagaattttatagttgataataatatagatatttttgatatttgtaatagttaatgttattatattattgagttttttattttaaattaaaataaatatatatattcgtagtggtttttattattaagttattagtaggggggtgatagtgatggagttattttttatagaaggaaattttaatggaataaaaaatgagtgttttgttaaattatttttttttatttttttttttttttttttttttgtttttgtttttttgttttttttttttgtttgtttgttttttatttcgatttgttgtttaagttggagtgtaatggtgtaataattttagtttattttaatttttgttttttttgtttaagttattatgttattttagtttttttagtagttgggattataggtatgtattattagatttagttaattttttgtattttttgtagagttggggttttattatgttatttaggttggttttaaattttttattttaagtaatttatttttttcggttttttaaagttttgggattatagttatgtgttattatatttagtttttgttaaattatttttaatgaaattggaagtttgtgttaatttatatatatggtgggtgagagaaaggtttttttatattatattgattttgttgatataatattttttttttttttttagagattagtggaaagtcgtcgatagtagattttgagggagtttgaagagttttataggcggttggatgaagagtagtaggtgttgtttttacgattggaagaagaggaataggatattttgtagcgatttcgagaaaatgttgtttattttggggataagcgtcgggatttggtttatttggttgtcgaggtggagggtaagtgtttatagttaggtttcgagatgtttaaggttcgatttttgtttttgtatagttttttaggttgagtgtagcgtagttttgcgtagtttgggatttgttagtttgggatatttatttttttgttttttttttttaaatttagttttttttgttaggtgtatttaaagggtttttgttacggaaaagtgattttttttatttttttttaattatttttgtgtttttatttttggttagtaattatgtgtttaatttgttttaaagaaaagatttatttttttgaaaggagggaagtttagtttgagttagtgaaaaattatgtattaaaaattttgtaaatgtagttattattatttttaagttttgaaatttgatttatgtattgttgaaaaaggatagaaatatagtttaaaggatataggtatattttagagatattgtgggtttagttttatattattttaataaagcgagtattttgataaagtaagttatattaattgttgggttttttagtggaattatatttttgttggtggagggttttgtgttagtattgattgatcgaggtggtggttgttgaagattggggtgattgtggtaattttttaaaataagataacgacgaagtttatttttaatttttttttttatgaaagatatttttgagtatgtgatgttgtttaatagtattttatttattagtagaatttttttgaaaatttttgaaaatttatatttgtagttatttataatatgggagttttgaatttttaaaagttatttataagggttggaatagattttttttaaatgtttgttaatattgatattttggtttttttttataaattataaatgtttttaatggtatttagaatggtgaatttttattagaaagtttttaatttattttgtttagatttattagaaaaattattatttatagtagttttatgaaatatatttattaagatttgaaagtttaaattattttttgatttatgggttgtcgattggatgttgtgttagcggacgtgaaaataatatgaattttattttatatttttattagaatttttgggtgattaagtgtattgttagtgagtagtaatattttgaaaggaatttttttttttgagtagtaggttttaatttaaaatttttagtaaagggttgggtacggtggtttatatttgtaattttattattttgggaggttaaggtaggtggattatttgaggttaggagtttgagattagtttggttaatatggtgaagtttaatttttattaaaaatataaaaaaattagttgggtatggtggtgggcgtttgtaattttagttattcgggaggttgagggaggagaatcgtttgaattcgagaggtagaggttgtagtgagttaagattatgtagttgtatttttgtttgggtgataagagtgaaattttatttttttaaaaaaaattttagtaaaggttaggtacgttggtttatatttgtaattttagtattttgagagattaagttaggaggattgtttaaggttaggaatttaagattagtttgggtaatatagtaggattttatttttataaaaggtaattttttttaattaaaaatatttagtatattatgttgtatataggtgtattgttatgtaggttttgttattttatttttagagtataaggaaagtagatttagtataatttttaagagttttaggatttttgaaatggtaagtgagtattggttttaatttaaagttattagttgtttttgtttttaataagaaagttattttgttttttgaagttttaaagttaggtattgatttttttcgaattgtgaaagttttggatagtattttttttaatagaaggttgtttgttgatattgaaaatgtgttgtttagtgtagttatttttattagtaattttggtaagattttttggataatttgttgtaatttttgtattagtatttgttgtttttttttgtatatttttgttatagagatggtttttttttttaaaataatttatttaattttaaattttttttttgtagtttttttattttttttagtttttatagaattgaaggagttaatagttttgttttggattgggttttggtttaagggaattatgtgattttatatttagattattaaaattttttttattttagtaataaagttgttttatttttttattatttatgtgtttattggagtagtatttttaattttttttaataatttttttttagtatttatagtttggtttggtgtttggtataagaggtttagtttttagtttattttggtttttaatgtgttttttttattaagtttaaatatttttaggttttgatttaaagtgagagatatgtgattttttttttatatgaatatttagaggttattgtaggattattaattgatataattttaatatcgttgtgtttcggaatagggaggttagaggagatggagaaagatgagggaatagttggtagtggattagttagaatatataaaatatatttatcgattaagttgttcgttttatatggatgtagtttatagtgtttttataacgattataatagtaatattaaagattattgattatagattatattagatataataatgaaaaagtgtgaaatattgtgagaattattaaaatgtgatatagagatatgaagtgaatatatgttgttggaaaatatggtgttagtagatttgtttaatataggttgttataaattatttatttgaaaaatatataatgttaataaaatataataaagcgaagtgtaataaaatgaggtatgtttgaaattgtttaaataatatattgtttttgatatgtatatattaataatatttttaaagtgtttgaaatattttgtttttttacgtaaatgaatggtgttagtaaaattagggaatatattttttattttagagattagattattagtatttgaagtagtgaggttttattgtatatttatttttatgttacgtattgtttggtatttgtttttatggttttttatgtatgtgtgttttgttttttatattaaattgggaaatttttgtgggatagagatttgttttttttgttttttggattttaagtatttataaattagtattagtatatagttattaatgtgtttatttttgtttttttttttttttgagagagttttgttttgtcgtttaggttggagtgtagtgtatgatttcggtttattgtaatttttgttttttgtgtttaagcgatttttttgttttagttttttgagtagttggggttataggcgtatattattatatttggttaatttttgtatttttagtaaagatagggttttattatgttggttaggttggttttgaatttttgattttaagtgatttattcgttttggttttttaaagcgtttagattataggcgtgagttattgtgtttagttagttattgatgtttattaattaatgtaagataggggatattaaatcgtaataggaatgtgtgatttgtttttatgttattagtttggaattttttgtatttatttttaaggagagtgagatatgtggttggtatttgggggatagagtaaagaattgatataatttttgttttttatagggagtttttagtatttttgaggagtaaagataagtataaaagaaattattgggaagtgatataaatgattaagttttatgatgattagaagttgaaagtagggattaggttgggagaagtgtatttaggtttcgttggagttttttttgtattgtgtgatttttagtttattttatttttattttatagttgtggaattttggggaggagggggaattttttgtttttaggattattgaatattaggattaatattgtttttttttttttttttttttaggatgttaaaagtattttggaaaagtaagtgattgttgtatttttttgagtgagttaggttttggtttagagaggaggggtatagttaggagtttgggttgggggtgaggttgggaaagttatgtagtgtgtttgggtagggtatgggagaatgtttattgtgtttatgaagttagttagagaataaattattgggaataataatttttttttttttttgaatattaggattttttgagaaggagaatgataaggtagaattagattttatttgtgttagtgggtggaattgtgtttaaataagatggtaggaggaaggggttgggagagtagggagggtaattatttatttgtatgaaatataggaatatttttagaaagttcggaggtttatttttaacgatttgtttacgggattataaggttttttttggattagtaaaagaaattaataggtgagttttttagggaggaggaagaaagtgggaagatggagaattttaatttttttttaaaaatgttaatatttgaatagttatttggttggagtttttttttaattttgttttttttttttttatttttttattttttttagatgtgaaaaggtgaagattatggaggtgattttagtatttatagagttggaaaagaattttagtaatttttttcgatagtattttgttttaaggaaaatttttaaatagttaattggtgagttgtttttaaaaggaaattagaagaaattattagagagaagaaagtttttaggttttattttatatgggttttagttattttatgttttattttttttatttttatatatatttatttttttatttggtttttagttttattttgagttatagaatttggagtgagaggaagttttaagcgttatttatttttaggtttatttttttttaaatagagatttagaaaggttaaataatttgttaaagttatcgggtagagtggttatataatttattatgtaaatttgtataatttttaaaggtcgggtgcggtggtttatatttgtaattttagtattttgggaggttaaggttggtggattatttgaggttaggagttcgatattagtttggttaatacggtgaaattttatttttattaaaaatataaaaattagttagatgtggtgttgggcgtttgtaattttagtttttttggaggttgaggtaggagaattgtttgaatttgggaagcggaggttgtagtgagttgagattatattattgtattttagtttgagggatagagtgagattttattttaaaaaaaaaaaaaaagaaagaaattgaaagggagtgttattatattaatgtgaatatgtagggaaaatagttataaattaggttagtttttggaaaatatatatggttattttatttttagattatatgttgttttgttcggtattttttttaatatttttcgtttttttttgttttttagattatattttgtatttttttatatagtgagataaatgataatgttagagggagatgaagagaggattaggcgggaatttagattattagttattgtagatttaagagattattatttgtttattttagggttagggtgagaagtgagttattgttttttttttttttttaggtgatattatggattgagaaagttaattaaattaggttgttttggggatttttaagggattaggttttgtaaaggtaggttggaagagtgaggtaggggtatttagttatttttatttttatttagttttttattttggtttttttcgttagcggatgtgattttggattttgagatagtttattttaatttagttttgttagaggatcgtaagagcgttaagttcgtggagataagatttcgggatttttttgatatattaaggcgttttattttttatttttgcgttttggttattgagggttttattttaggtcgatattattgggaggtggaggtgggcgataagatttattgggtagtgggtgtatgtcgggatttcgtgagtcgaaagggcgagttgattttattttttgagattggttattggcgggtgcggttatggaatggggataaatatgtagttattattatattttttatttttttgtatattaaggtgaaatttaagcgggtaggtatatttttagattatgaggtcggtatattgtttttttataatgttatagatcgtttttatatttatatttttattgatatttttattgagaaattttggttttttttttatttaggtattcgggttggacggaagaatgttgtattatttattattaggtttttaatagattgggagtgataggttgggatgtgggaatgattggggtgaggtagggttaagtgttacgggtttttttttcgtgttttgttggaacgttttcgtgtttatttgggtttagttttgaattattttggagaaatattttggtttttaggatggttttgtgtggagggggaggtaggattgggttggatgagagagtatagttgtgatttttttttaattgttagggtggggagttggtttttagaggattgtttattttgaagtttattaggttttttgttgtataaggacgggttaggaaggaaggagaggtttttttagaaataaaaaatttgtgagggtttgatttgtttaaattagaggaggaaatagaaatttttgtatatttttttagggggttttttgatttaggatagttttgttttttgaggtagattataggggtttgtgtatttttgaatttatgagagatgaatgatagatgtttttatgggtttagatattgaggagtttttttgagggtagagattggatattaataaggttagaagggttagggaagtgggttaaaggaatagatttttagagattaatgaagaggagggaggtttttttggttttttattttaagggtaaggttgcgattatgggtaagattggttagaggtaggaatgtggggagaaggagaggttgaaaagaaagtagaggagaatttaggtttttgttttagtttttagtagagttggtttattgtttgtttttatattaataagttagttattttgtttttttttagaggtaaagtggaagagattttgtaagatatatttatttttttatagtgtttttaagggaatttggaaaggagagttaggtattagaggaaagagaagggtatttgtatataaagttttggttttaaagaatgttatttagtagttatttttaaattgttagtttttttatttggttaaggtgtttaagttagaaaggaaaaaaggttatggagttttttttattttaaggatagggtggaagagggtggtatatagggaagggttagataggtaattttatttggtttgtgtgtatttggtttggaattggtgttaagttaggtttttgtttgtttgttgttattttttattttttgttatttttttttttagagaatgtaaatgatttttatgttaggttaaaataaataatttatagggtatatatgttgttataaaaggtaaaagtgatgtatgttaaattaaattaaattaatttggattatttgttattcgggtaatttttatagaaatgattgagagaagaatttgtagtttattgagggtattttagttttttttattattttaataggattttgtttagatttttttttttttatttttgtgttttgattgtggttttttgtggtaagatattttggttggttaaaataatatggaataaaggatttattgaagtgatttttgtgttgtgtggtaatttggtgatagttttgtattgatgtgtaagaattattgggtgttagatatgtatgtttttgggttttatttttagtggttagttaaggtttggggtgggtcggatatttatattttatttatgagatagagtttcgttttgtcgtttaggttggagtatagtggtgattttagtttattgtaattttcgttttttaggtttaagtaatttttttgttttagtttttagagtagttgggattattatggattatagttatgtattattatattcggttaattttagtggagatagggttttgttatgttggataggttggtttcgaatttttgaatttaagtaatttatttgttttagttatttaaagtgttaggattataggtgtgagttatcgtgtttagtttatatttatattttaaatatattatttttatttgagttcgaaaatttttgtgaaattagttttagaggaggttttagttatgtttttttttttagttggagttttgtttgtttgttttcgtttggtattgggtttgaaattggagagaagttatttttttttgatttatgttgttttttttattttagggtttattgattttttatttttttaatttatgtttttttgtttttgattttagtaattgatagttattatgagttataggatattagatagaagaattggaagatagaagaggttagagggaggggtgtgaggtgaatgttagtgtggggagtggggtgaagttttaggggtaggggatgttgttgatagatttttgtgttgtatttaagtttaggagttagaaattatttatttagaaagtgaggattatttattgtgtgtttagtattgtataataggaagtgtgtttttttggtaggtggaatagtaggagtaaattgtgttttttgaggatcgggagtttttttttttttttttagtatttttatgattttttttatttttatttttattggtattagtgtttttttttaatgtattatttttgtgtttttcgtttgtagattttataggtatttgtttcggattttaggagagtagggtagaagttttagttgggtataaattgtatataattatttttttaacgtagttatataaagagattagttttttgttttgaaaatggtcgatttaagatttttatttgttttattaggtttttaggtgatataattggttatgagtttgaggaagataaaagtattgaaaatttataaagggattttgggtatggattgttggggttgtgtttagaaatcgatgagtttgtgaggttttcgggaggttttcgagggcgcggggattacgttttttaggaggtttcgcgcggacgttcgggcggggttgtgcgaggggtggggttgcgggaggttttggagcgcggcggtgatggcggggtcggtgaaggatcgcgaggttttttagaggtttaattttttgtattaggtgagtttgcgataagggttttacggggacggtgttcggcgttttagagtgattgtttttttttcgtaggtcgtttattgtgtttttgtttaggatttcgagaattaggcgttggcgaggttttattgttatattgagaggattattgcgaagcggttcgttttgcggcggtgagatagttacggggcgggcggcgggcgggacgcgggaggaacgcgagagggagcgcgggcgttagattattattttttttcgtttttagggatttttcggtgaagaggattttttgtcgaggttgttttttttttttcgtttcgggttttatttgtatttatcgttagagacgtgagtgttttaacggaggtggaagattgcggagtattgggggcgcggaggggggcggggtggggggcgggtattggaggttaatagcgttttttttattgtagatggatgttgggtgtgggattcgtaggagtttttttttttcgggtttggattaagtttttaacgttatttgtataaattagggtttgggttcggttgtttttttttttttttttttagtgtgggtaataaataataatttttaagaggtaattttatttatgtataataatagatgttgttcggttttgtggaggacgatttttattattatttatttattaagtaaatatttattttttaaaatgtgttaggtattgtgttagatttattatttttattgaaattacggtttgatgggatagattaagaaataaaatggtgtagaaaaagattaattgggggagtagaatgtttatttatttatgttagtggtggcgaagtttatgataagtaaagggagtgagagatggaaattttaggtatgtgtgtagattttgagataagagagtttgtggtgttgttaaagaaatgagagtttaggaggttggagtttgaggtaggagggtaaaatatgagattggagggggaaataggttagtttttgaagttttgttagggagtttgaattttattttaaagagttttaggaaatcgatggagtttatgtcgaggtttgatattattaaatgtgtatttaaattgggggtgtggtgggggagcggggatatttattgaaaaatattggaggtaaaattggtagtaagagatcgttatttttaaacgtggatagttttttttttatgtttattttaggttgtaggggatagcgttggatcgtatagatttgtttaatatgttagcgtagttaacgtttttttaatgatttcgggtatttattttggggagataggtttgaggtttagttcgggagttaagtaggtgagaggtgagggagaaaatggaggatattttagaggatagggataatggagaacgtagagtgaagaggatatatggataggttttgggttggtgtgagaagtattatagttagaaaattaattttgtttttttgattttgtttatttatttagattttaaattattataatttttgttaaatatagtttattttattttagatcgtttttttgaggagaaaatgtagatttagggttttagtaattagtgatggatttattttattttttaaataaagtttatttgttttatattttatgattttgttttgtgggtattttaatttttaattttatttttttttgtttttgtttgtgttttttggttatttttgtaattttattatgtagggagatcgtgatttttatagattatttggttttatttagtagtttgtatttttaaggttatggttttagttttttattaatgttttgagttattttagggtattttatgtttgggtagttataattgttgattgaagagttggagagaatgatgttattgttgttgtttttaaataaggggagaaatatggggtagcggagagtgtttgtattttttaggtttatttatagttagaaaagatttaggtttttttttagttttaaagttgtttttaataaaattttgataaaggaaatggcgtaaatttgaattaataaagttaaagatgttaataaaggatatcgatagatattttgtaattatgttttataggtaaatttttagagtttttttaagaataaataattaaaatgtttttttcgatatttttagaaagtttattgaagtatagaatttttagattgatttttttgttaaatgttagttaataaggttatattaaaagtatataaataaaatttattatttttagaatgtagtttttttttattttttttataaattttgtgtttgtttatcgatagttgtataaaaaaattattttattatgttggagtttaaaatataatgatttattattttttttggttttgtgaattaggaattttgaaagattttggttgggtggtttttttgttatatatgaaattagtttaaatagttgtatttagttgttatttcgtaggtggtttggaagatttaagaaattttatttacgtgtttagtattttattgtttttttaagtagttttgttttttcgttagttttgatgtttttatagtatggttgatttagggtagttgtattttttatattttttttggtttttataaaagtattttaatatgtaagtgtttggttggatgttgtggtttatatttgtgattttagtattttgtgaggtcgaggtaggtggattatttgagtttaggagtttgagattagttcggataatatggtggaattttgtttgtatttaaaatataaaaaaattagtagggcgtggtagtaggtatttgtaattttagttattcgggaggttgaggtaggagaattatttgaatttaggaggtagagttgtagtgggttaagatcgcgttattgtattttagtttgtgtgatagagtgagattgttttaaaaaaaaaaagtgtttatcgagtttttgttggggttatatttgttaatgtttttttggttaaagtaaggtatagtgttaatgttagatttaatgtggaaggggttatattggagtttgaacgttgggaggtttattagttttttggggattattagtgtaataatttattataggggtttttaatttttaggttttgtggattggtattgggttgtgttttgttaggaattaggttgtttagtaggaggtgagtagtggtggaagggagggatgggttagtattattgtttgagtaattagtggtagtattagatttatataggagtatgaattttattgtgaattgcgtatgtaagggatttgggttgtatgttttttattataatttaattgttgatgatttggggtgaaatagttttattttagaattatattttttttgttttatggaaaaattgttttttataaaattagtttttggttaatttgtttttagtgttaaaaaggttggggattatttatttattatatttttgttttgtttttgtttttgatttggtttttttattgttttttttatatgttagtaaattatttgcgtagaaaatattaaatagtgtatatgtaagtaaatgtttttgagttattttttgatattttatttttggaaatagtgtttatttgggttaatttttagtttaataaaaatgtgtagtttgaaagtaatatttcgtgtatatttgggttttttgtatttttagtttattttttatggtttttttagtaagtttaatttgggatgattgagttcgatttttgtatatttaatttgatttttggttaagtttgttttgagtgtgttatgattgtatgtgattgaatatgtttatagtgggatagtagtggggaaattgagtttcgattttatggtttagttattaagtgattttttttatgtgggagattatgggaattaggttttagttaggatgagcggtagataaaatagtatttggaatttggtttatttgtgagtttttgtggtttttttatttgttgtgggtttttattaatatataattttaaagattatagttttttttttttttttatagttttttttttttttttttttttatgtttaattataaatatatgattatatatataatatttatattttatatattgatatatgattttatgtattaatatagatatattataaagatatataatgtgatagtggtatattatatgtaaaaatggattttttagatgaaagatgaaaataaattgaatttttggaatgtagtagtttttttaagtgtttttagaagtttaataatttaaaatttatgtttttttaggattttaaataaaattaaaggagagagaagaaatttaggttatttaaatcgaattaagaaatgaggttttttagtaattatagaaattatgttttagttattttttgaatattaagtttatttagtatttttaaaattagtgaaaattagtatcgttattgttaggaggtaaaagagagaaggattgagagattgttattttgaatttaagtagtaaaaacgttagaaaagataggttttgaatattgaggaatttgagttattgttattataataaattagtgtgtatttttaatttaaaataattatattattatgaagatagtgtttatgtttagtaattgtttaataaatttttaaaattattttgaaatatagatttattggaagttgtaaagagtatattgaaatgttttttatatttttatttagtgttttttagtggtttttttttttattgtggtaaaatatatttaatttaaaatgtattattttagttattttaaagtgtataatttagtggtattaagtatatttgtaatattatataattattattattatttagttttagattttttttattattttaaatagaaatttgtttttattaaatagttatttttaatttttttttattttagtttttagtaattattaatttgtttttgtttttacggatttgtttattttgtatattttatataaatggaattatataatttgtagtttattgtgtttgattttttttatttagtataatgtttttagggtttattcgtgttgtagtaaatgttagtattttatttttttttatggttgaatagtagtcgattatatggatatattatattttgtttatttatttagttattaatggatattttcgttatttttgttttttggttattgtgaatagtgttgttatgaatatttgtgtataaggttttgttttagtatttgtttttagtttttttgttggaggatataggtgcggttcgtttgatagttttatattttaattttttgaggaattattaaattgttttttatggttgttgtattattttgtatttttattagtaatgtatatggttttaatttttttttattttaatttatatttatttttagtttgttttgttgtttattatagttattttataataatattttagtgggtataaaatcgttagaagttaatttaaaatattagataaaaattataaaatttttttgtggttttgatatatagttttttaatgagtaatgatgttgagtattttatgtgtttgttggttatttgtatattttttttggaaaaaggtttttttaagatttttgtttatttaaaaaaaataggttgtttttatgttttgagttttaggaattttttatatattttgaatattagatttttattagatatatgatttgtaaatatttttttttatttcgtggattgtttttttatttttttgatagtatattttgatgtataaaagtttttaatttttatgattttgtagttatttttttaagaattaaattgttttttttagattttattttttgtttttattttgattttttttggagtttgttttaattttggttttgtttattgtgattttgatattatttaattaggatttttttatttttttttagatttggtgtttttaattatattttgttttattttgttttgaaataggaaagtgttttttttggatttttagagtagatgtgggtatttgagtttttttttttaaaatttttttttttttagagcgattaatgagttttgttgaatggtttatggaagggaaatgaatgttttaaattttttttgattttttttttcggatttttaaaggtattttttattagtatttattatgattttatttttgattgtaatattattttgaggtgttgggttttgggtttttattttgaagagattatattgatttggtagtaggatggggaggattatatttaggatatggagtttgtagagattattttatttttttgataatttttttttttttttttttttttgagatagagttttatttttgtttaagttggagtgtagtggcgcgattttggtttattgtaagtttcgttttttaggttgatgttatttttttgttttagttttttgaatagttgggattataggtattcgttattatgttcggttaattttttgtatttttagtagagacggggttttatcgtgttaattaggatgggttcgattttttgatttcgtgatttattcgtttcggttttttaaagtgttgggattataggcgtgagttatcgtattcggttgataacgttttttaagttttttgtattgtatatatatttaatttagtgttttggattgttatagattatgtttttaaaatattttgtttatttttttttttatggatagttaattagtttgtttttaattatatgttattatatatatttttgtagtagaattttagattatggatttatgagagtgggtttttggagtatttagttataattataaattggattttaggtttgtgtgtatggaaattatttgaggaaagttaaatttttttttagtttttatagtttatattttttagtaatatattaagtttatttttttttatatgtttagttgattttaattgattttttaatttttgttataatttaattagtattaatttttttttttttttgttgtaatttgagttttttttattgttagtgatattgtgtagttttaaataagttattattatttatttttttttttttttgaattgtttatttaaatgtttttttttatttttttattagattttatggtgtttttttttttttgttttgaagggtgttatgggttaaatgtttgtgtttttttaaaatttatatgttgaagttttaatttttagtgtggtggtatttggaggtgggattttggggaggtaattaagtttagatgaggttaggaggggggggttttcgtgatgggattagtgtttttttaagaagagggagattggagttttttttttttattttgtgaggatatcgaaagaaggtagttatttgtatgttaggaagaggatttttattggaattgaatttgttgttatttttaaaattgtgagagataaatgtttgttgtataagttatttagtttgtggtatttgttatagtagttatggttgattaagatttaaggttttggttgttttgtttgtttgtttgtttgtttttttgtaatggaaaagaatttttttagagttttatttggtatatttgtgtttttaatatattttgagttgatttttatagattgtgtgaagtaatttgttggttttttaaggttttagtgaatgttttttttttaagttgtatttgagtttttttatttgtttgggtttggagttttttatgaagttttagttgtaagtagtggttagtggtaattttttttaggagagagtttgtttttagttagttttttgataaatagtatgttggaagtattagttttttttattgtttttgttttttgttgatgatttattttttatggagagtggtgttttttttgtttttaatttaattataatttttttttttttatattttttttattgttatgtaatttggggtagagagtttttgtttaagtatgaatttattgtgttattttgattaaagtttgttatttagggatgtgttttgttttgtggtgggttattttgaaattattcgttttagtttagtggaatttaattagaattgtgggattgaaattgttttttgaagaggaattgtggggaaaatgaataaattaatatttaggtttagttggagtatgtttttaggtttttttaggttatggagtataaagttaattgttgatttatttttttttggttttatagttgtagaaagagatttggtttaaaatttttataattgggataggttgagtttaggttttgatattggttagttgtgcgattgggtaatattttgttttattttttagttttatttttaataggtaatatatgtaagtagtaggaaatttagaaagtatgtaaatagataggggaattaattttttagttatttattttattttttagaggagaatacggtaaaaatattttggatatttttgtaaatatatataaataagttggtattgatttaaattttttttttatataaatggtagaatattattttatgggttatatattgttttttatttagtaaaaaaatttagtgtttttattattttagtatttaatattagttttattattttttattattgtataatattttattgtgtgggtatattataatttatttagtttgttttttgttgagtatttatttttttttaaatgttttgtttataaataatatgtaaagtttaggtatggttatatatttagtatggatgagtttttaaaatatattatttagtggttgggtgtggtgttttacgtttgtaattttaatattttgggaagttgaggttggtggattatttgaggttaggagttcgagatttatttgattaatatggagaaattttatttttattaaaaatataaaattagtttggtttggtggtatatgtttgtaattttagttatttaggaggttgaggtaggagaatcgtttgaattcgggaggtagaggttgtagtgagtcgagattacgttattgttttttagtttgggtaataagagcgaattgttttaaaataaaaaaaaaaaagaaaaaaattaaattaaaaaaaatatattatttagtaaaattttagatataaaagaatatatattgtatgattttatttatgtattgtttaaaaataataaaatatgaatatatatatagatatataatttattatttagtgatttttttttaggtgggaaaattttgaaaataaagtaagaaaatatcgtttgaaaatttagggtagtagttaattgggaggggatgtgattgttggagtagaggtatttgggttgttagtaacgtttaattttttaagtaagatagtaggtatattgtatgtatgttttatttagttgtatttttttgtatttatgttatgttattgtttacgataaaaacgattttaaagtgaagtgaaaagagtattatgtttaagttttttgtttatattttattttatatttgggtttttatttatatgataaatttttaaaggttaagttgttagattaaatatttttgtagttaaattttgatggaaaatattagttgttttttatagaaattatattaatttattttttatataaaataagatataaaatagtgtttgattattttatttttattagtataataaggtattattaaatttttgggttttgattatttgataaataacggtttttgtgtatgtgtgtgtgtgtgtgtttttgttatagggttttaataatgatttatgtaaatgtgtatagaagtaatttttttaagtggttaggttttagtgggtgggaaatatttttataaaaaaattgagaaattttgtagttttattttagtttaatgtaaaaaaaaaaaaattaagaattgtataaatgtgatttatgggtattgtattttaaacggttttatttttatttaataaatggattgatttattttgatatgtttatttttttattttttaaaataaatgaggtttaatttttttgatttaaattgtttttgttgtgttttaagggggatttaggtaaggatgtgggttaggggtagatggattgaaaacgtgtgtagtgagtgagttaattatgttttaggaagattaaagtttttgagatagaggatttttaggtagagatggtagcgagttttttagtttaggtttttagtatcgttaattttttggtaaaagtagttgtatttattttttttttttatttttattttttatgtttttgggtattaaacgtaattttgttttagagtttaagggtagtgtagtttaaggaaaatttgtaagaattttttagttttgaagttttttgtttgaaattaaggagagattaaggtttagggagaagaaggggaatattttttttggaatgttgggtatttttaagtaggagtagggggttttgttttggagggaaggtttgttttgaattgttttgtttgtattttgttttaaattttgtattttttaggttttaatttaaataagtataataggaggttgagtttgtagtggagagtgaaatagtatgatagttataaaattgttaggatttgtatgtggttggatgttattgtttttatttttttttatttattgttttttgtagtattatttttgtttaaatatatttaaagaaaagaattgtatttttatttttaatttaaaattagtatttttttaatatattaaaataataaaggaattaattatatattaatataaataaaaaattaaattaaaaattaatttgggttatgtgtgtttataattttagtattttggggggttgaggtaaaagaatcgtttgaggttaggagtttagaattaatttgggtaatatattgaggcgttatttttataaaaattaaaaaaaaaattagtcgggtttagtgatatgtatagttttagttatttgggaggttgaggtaggaggatcgtttgagtttaggagttttaggttatagtgagttatgatttcgttattgtattttagtttgggtaatagagtgaaatttcgtttttaaaaataagaaaaattaatttgttattttgttaaataaagatgtttttgggaaatttaattttgagtgatgttttagttattttttatatattagtttttaagtgaattttttttttttaggatatgtggtaatgtttggatatattttgatgttgttataattaggaaggtgttggtgttataggtatttagtgggtagaggttaggaatgttgttaaatattttataatttataggataatttttataataaagagttatgtggtttgaaatattaagtatttattgtaacgttgaggttgagaatttttgttttatatagattttttgagtttgatgttttaggtaggtttttttttttgtaatatttataatatttgtataaattgttgtgttagtttttattatattgtaaggttattgtatttattgttttttttttataattgtgggtttttggaaagtaggggttttgtttgatagttatgttttgtaattatgtgttttatgttttatattttttttagtatttgaatattgtttggtatataatatttgttttataaataattgttagaggtatgagtttagttttgagatatttaggaaatagtagaaattagtaatgattagtgagataaagagaaggttattaataaagttttttttttattatatcggttttttttaaaattttagtgtggatggtaatatgattatatttattttatatataagttaattaatgtttagataatttatatgacgtgtttaagattttatgattggatagcggattagttgagattttcgtataatttatttgattttaaaattttaatttttttattattatgtaaagattgttttttaaatatatttttattaaaagattatgagtggtcgggtgcggtggtttgtgtttgtaattttagtattttggaaggttaaggaggtcggattatttgaggttaggagttcgagattagtttggttaatatgatgaaatttcgtttttattaaaaatataaaaattagtcgggcgtggtggcgtatatttgtagttttagttatttgagaggttgaggtgggagaatcgtttgaattcgggaggtagagattgtagtgagtcgagatggcgttattgtattatagtttgggcgatagagcgagatttttttttaagaaaaaagagaaaaagaaagattatgatagacgtttttgtttttaaggtggttaattgggtataaaattttttttttttgatttttaagatattgttaaaacgttattaggggaattgaaatttaaattgtaaagaaggatgagtttagtggtgaaaattttttataaatattagaaatagaaaaaaatttttattgatttatgaaagaaggtagaagttttagcgtataagaaacgttagagggggttgtagtttagagaaaattaattaatttattaaatagagttttagaaagaaatttttttttcgttttttcgtttttttttgtgtttttgtcgtttttttattttttttttggaagacgtagtttttgtattttttttttggaagatttttttttttatcgaggttatttattaaattcgttatagggtgtggtttagggtcgagttattatagatttgtttttttaaggttttcgcgtcgcgttatttaggtagaagcgttgatttcgtatttttttcgtcgggattttacgcgttgttttagtgaaatgaaattttggtgtttgtggcgtgcgttgcgcggttttatttcgttgtgttttttttttcgttcgttttcgacggttggacgtttttttgtcgattggagcggtttttagtgttacgtgttttgggatttttaaagttgatcgtttttatagggtgtgttaaagtttattaagcgttattttagttttaatttttattttttataatttaaaatttatttattatttatgtaaggagaataattggtatatttagcgtagttttgtatatatataggttataaaaggaaatgaagtttgcgtgatatttttcgtgaaagtaatagtatcgaattataaattaaattgtattttagtcgattttttgaagaagaggaaaagttttgttaaatgcgtttttttagtaggatgtaaattttttttagtaaatattgagtaaatttgggagtgttgagatatagtataatgcgagtttttagtgtaattgaaaaaattgaaaaaattgaaaaaaaaataattaaattaagattttcgattgtttttaaggatagtattgaggtagtacgtttgtagagtgatattttttaaaaatgttgtaagaaattataaaattagttggagatattttgttgaaatgtgtttttttataaagtagagttaaaaaaatatacgttatgtagtatataaataaagtggaagttgtcgatatacgtataaatataaaggatttttgtttatataaaaaatattttaatgttttaatatgtaatattgttgaataaatatggagttaaataagtggtttttaatgaattattttaataaattttatttcgataaattatatatttaaaatattatatttaaaaataaattggagagttgtagaagaaattttatttatttttatgtgaagtttgagatttgtttgtaattttttttaaattaatgtaggagagaagtgcgtcgttgaaataattatttcgagtaaaatagtatttttttttattatataataaaataaaaattttatttgttgtattttagtttagaatttattgtgtttattttaagtagggaatgtattaaaatttaaaatttagtagacgttttaatgatttaagaattattatagaaaatattttttttttaggaataagttgttatattttaattattaagtaattttaatttttattgtttttagaattttttagtttgttttagagtttaacggtttagtgtgtaaaattgattcgtgaattttgtaggtgatgtggatttattttgtttagtaggagtttgtagtattggttgaaaaaattgtttttgtggtgtttgatgagagatttatgtttttggtaattgtatatttagatacgttattttgtagagtttttattgttttttaatttattttttatttttatttaatttttgattaggagtaaattttaagatgagtttagaggtttttgtggttaagggtagtgaaatttattaaagtgtgttagggttgagagaatatcggaattttgtaattgtgttttaaatttaggattttttatttttagtttatcgtggtttttgtggagtagggttatatattgtgggtaatttgtggggttttagttatttattgtaagatattgtttattttttttattttatgttttttatatggtgtagtaaaattttagtgggggttgttggtgttgggtgttggcgggggttttttatttagtagttgttgttgttgagttttggaagtttgttatgggttatggattgggtaatgtgtgtttaggttttatgtaggaaggttgattatttttatttggagttatagtttaggaaggaggtagatgaagtagatgaataattattagtatgtttggaaagagtgagatattttggagatttaagggatagtgttggcgatttattggaggtttgtagtgttataataggagggtgttttaataggaggaaaatatggtttaattgaagaaagggttagaaggaagaaaagaggaagatgggttttagtgttagaaaagagagattaaatatagtcgaaaaagtagagaaatgtatttttttttaagtttttttgttgttatttttattgtagattttagttttgtttttttagagttttttttttggtattgtattgtagttttttagtcgatcgagggcggtttttgttttttttgtagattgtatatttttgttttcgtttagcgttttttatttgttgtcgttttttttaagtgtacgaatatttagagtttaattttcgtaaatttagtttgcgtgatagtgttttaagtcgggagatttatagtttttttttttttggatttttaattgatttgtagtagcgggtttagtatttagtttagtacgtttttggtttttggtttagtttttttttttatttaggtttatggagttattttattttaggtttttgtttttgtttggggtgcgaatcgtagtgtgtggttatttttttagtttagattattattgtttgtttttgggatttttgttaaaattttttaatatatttttttgtttttagttttgtttttttttaaagattgtttgtaattagagaggtttttgtaaaggaaaatgttatttgttttttttttattttaaaatttttatggtttatataattatttcgattgatatagaaaagtatttaatagaatttaatattttttttgataaaaatatttaataatttaggaatagaaggaaattattttaatataataaaggcgatatatgagtagtttattattaatattatatttaaggagaaagaatgaggaaggttttttttttattattagaaataagataaatatatttatttattatatttgtttaatttagtattggaagttttagttagagtaattaggtaagaaaaataaagtaaaatatttaaaatggaaaggaagaagtagaattatttttgttagaagatagtatgattatatatgtagaaaattttaaggattatatatatatatatatatatatatatatatatatagaggaagagagagagagagtattaataaataaatttagtaaagttgtaggatataaaattaatatgtagtagttagttgtatttttatattatgttttgtaatatggtgttttttttagttttgaagaggtaagttgatttagtttaggtagagtatcgatttagaaagagaaagaaggaaatagttgaaaaaatttgagaaggtatattaatttgtgagttaaatataaattataatgtgtgttagattaacgaaatgtatttttttatagtaatatagtatttttaagttttgtttagatattgttattgtgtatgtttttagaaaatatagttttaaatgtgtatagttttgaatataaaagaattaaaagttattaatatgtggtataaatttttaaagtattttaattgttaaaaatatatgttaaagttatagtaaataatattgttttgtaaatataagatataaataatttgtttttttataataattttatttataaattattatttgagtaatttcgttaatcgtttttaattttattttaatttttagaaattgtgagtgttgttttatttgggaaaaaggattttgtaaatgtgattaagaattttgagagagattattttggatttgttgggtgggtttaatataattatagtggtttttattagaggaggtaggaagtgttagagttagaggagaagggaatgtgatgatgttaggagagattgaagtgatttattttgaaggtggaggaagggtttataagttaagtaatataaatagttttagaagttggataggattggggaatgggtttttttttagagtttatagaaggaattagtttatttgatattttgattttagtttattgaaagtaattttgagtgaattgaagtttatttaaaattattttaatttgttgattttaagagcggtaagtgaatatatatgttttatattaagttattaaatttgtggtaatttgttataatagttataggaaattaatgtattattttggtagtttggaagataatttttttaaggatatttatgttaaatttttggaatatgtaattattattttatatgataaaagagtgaatattattttgtatggtaaaagatatgattaatttaagaatgttgagaggatgagttagtttggagtatttgggtgagttttaaatgtaatgatatgtatttttataaaagataaggagagggaatttttaaaaatttttattttaggtttgagggtatacgttgaaggtttgttatataggtgaatttgtgttataggggtttgttgtataaattattttattatttaagtattaagtttagtatttatagggaatttgaggtttatagatatatagagtagaaggtgatgtgaagatagaggtagagattggagtgatgtagttataagttaaggaatgtttgtagttattagaatatgatagatgtaaggaattgatttttttttagattttttggaaggggtatagttttattgagattttgatttggggtttttggtttttaaggttgtgagaagatagatttttgttgttttaaattattaagtttatggtaatttgttgtagtaattataggaaattaatataattattataatttaatgtttaaaaagtaattaattggatggttgtaaggtaaaattatgtattttaaatttaaaagttgatatttgtttgtaagaaatttattaaatgttaaagaagtatttgatttaaataagttttttgaatttaaaattaattatttgtatttaaaagtataaattgcgttttatttgtattattatatgttaataagataatgtaaagtttaaaatgtaattttgtattattttaagtatttgtgaaatattatataaattaaataattttgttttaaaaaaatagaaatatcgttgtgttatagtattttaaaatttttaaagattttattatttatttatgttgttattagatattataaatttgttttttgatttaaaaattttatagtagtaaatagagttatttgtttttgaaaattgatttttagggtttgtatcggtgagaatttttttttttaggagtttgtagtatgtgtgggtaaaattagattttatgatgtttggtatggaatttttgttttttttagggtgatagagggttatattgttttttgtagagttttaatgtatttttatttttaatttcgttaggttaaaagtaatttttaagataagtttgggtttttgtggttgatgtttgtaaattgtgttgaatttgtaatgaggtttttatttttttttaggttttggttaaaagtgtgttataattgtggattaatgattaagttaaattttttatgaagtggtagattatatgttgtgtttggtggtgaggttttaggttttaggtttttgttgttaaagttttgtattttttttattgtaggtttttatttggggtaatagtatttgttttgtgaggatttgttagtgttatttttagtgttggtggtgtttaatggttgttatggaaattagggattaggtaatgttttttagtttttatataggaaaattgattatatttaattgaggaaatattgtttattaaggaaacggatggatttttattaaatttttttgaacggtatttaatattggttttttaatgttagattatatgtttaatagagtaaaatatgtttttgggatttttttaagattgtttaaggttttgttttggtatgttattattttatgtattattgttggaagcgagaaaagttttaataattgttatgttatatttagaggataaagttgaatttaatatttagatttttatgtattaattggtaatgtttgggaatcggtaatatttaagaattttataaagttagggttttgaagtgtattttaaaatagattttttattttttgaagtatataaatatttttttaaaggtatttaatttataaggattttttttgatagaattagatgtgaagttgttataaagaaatgatggtgtatgagaaattatgattttttagggtttgcgtttgttgaagttattgattatgaagttattttttttgtgggtttgggtgttaggaagaatttattgtgattttattgtggatttatttttatttaagatttagaaaattagtagtatatttggttaatacggtattttttttttgtattgttggatggagttagtttaggcgatatgaattttttttttttattttttttttttttttttttttttttttatataaagttttgttttgttgttaggttggagtgtagtggtatgattttggtttattgtaatttttgttttttaggtttaagtgatttttttgttttagttttttgagtagtttatttaattttgtatttttagtggagacggggttttattatgttggttaggatggtttcgattttttgattttttgatttattttttttatttttttaaagtgttggtttttttttttttgtagtttttatagtgttttttgattttgggttttatagagtggtatttatagggtatagttgttagtgatttagggagattaggaggtggtaggtaagtgaggggaatttagaagtagttagtatttgtttaatgttagaaaaatttggttaggatatgttttttagtattgagggatatagtggtagttgtggtgagaattgtggaaattagtataaagttgaattataaattagtatatgtggtttagtatagattgtttttaggttttttgtggttataattataattagaattggattataattaaatttaagtttttttgagtattatattgttatagtttattattgtttttagaggagattaaataaatatttttggatttattattgatgtattattaatgattttgtaaagtaaattatgaaaatttaaaaaaatgttttttggttatttattttttatttgttagttattatgattgtttttttttatttttttgttttttttagggtgtttttgggatttttagtagaaatttttaattttaggtttttagttgtttttgtatagaggatatagttttgttttaaattttttagtgttatatatatatatatatatatatatttcgttttgagattttttttttttttttaagtttttgggattatattatatgttttagtggttgtatttttaggattttgaagtgttttatttttttttgtttttttaaggagaaaggatggaggaaaggagtttggtttttttaggattttttttatatttaggtttttttagtttgggaatgaaaggatattatatattagtgagtaattatggaggtattaagagacgttatttagtaattgtgtatgggagggaggtttaataggaggattaaagagttagattatagaaaggattacgagaaaggagtgggggagttagtaggtttttagtggtaaattaattatagagtagattaaatgtttgtaagtgtgtagaggttttgagttaggggttattgttttgtgtattttttagttattttggatttatttttttttatatgatttttataatttttagttgttgtatattttgttgagtgataatttgtaattttattttattttgggttttatattgtgttgtttatttcgttttagtgttagaaatatggaaaattttagtttaggggtttttttgtttatttttattttgtttttttattggggtgtgtaggtgttagattttttttttgttttataagtgggagttttaggttttttcgattttgttttcgagtttttgtagttgtattatttttagtgtttgtttttttggattttagcgtagtttttatagttttagattttgttattttttttgttgtttagagttttttaaaattttttaatttattttattgtttttagttttgttttgatttaagtaagatttgggttagtgttttataattgtaggaattttgttgaaataaaaatttatttttgttttttttttatttaaaatattttaatgatttattattaattttaggataatatttaaatttttaattaatttttttaattttgtgtgaataggattttgtatatttttttaattttttttttttttttttttgtattagttagtgattttgtttatagttttataaatatgttgtaaagttttttattttttggtcggattaggtgttttttttgtttgggtttgtttaatttttgtttttttttttttttttttatatttggatttttgttggaagtttagtttgtttttttgaaattggttttgtttttttttttttttttttttatagatttttttttttttttttaaagtattttttgtagtagtttttatttatttggtttatgtattttttttttattatattgtaattttagaatataaatgtttatgtttatgttttttattgttttatttttaaggaggagtatagaagttggtatattttgggtttttaagttgtatttgttggatagatgaaaaatagggatttttatagtaataatgtatattgagagtgtttttttatagtgagagtttaagagataatatatataaatttaaaaaaaatttatttttaaaatgtgtaatattaggtatgatattaaaaaaggtgtttattttttttattggatattaggattaatgaagatagttatattggtttatttattttttttttaaatagtttacgtttgatttttgtttgttgaaatagtgatttatataaaatggatgagaaaatggagatatagagaagtgaaggattttgtttagaattatatagttgttaaattttcgggtttaagttatttttatgtttttgttttttaaaatgttaggattataaatgtaagttattatattagttagtattatataattaatttgttattgtttaaaaaggaaaaaatggaaagtgagttgatggagaatgaaatatggatagaggaagatgatgggaagttttgaagggttgtttttgattttgtgtgtgtgtgcgtgtgtgtgtgcgtgtgtgtgtgtgtgtgtgtatgtgcgtgttttttatttttttttaagttacgtttaattttatagggattattggggtttttgttagttatagttatatatatttatagaaattttgatttattgatagatgtaagagggtggtttttgagagttttgaatttttattttataggattttggatatttggatattttttttttacgttgtttttgtatcgattttagggattgtgtttggggtgttttttgtatttattttgtgatagagttttatttgttttttagatggtttttttttttttggagtggaatcgtggttattagggttttgggtcgagtatttatgagtgattgtgtgagttgttagaagtaattttatatttttatagttattttatattttatagtgatatttatttttaagaaattatttaaattaagagagaaagttatatatataaataatttatggatttgattgattaatatggaaaagtattaattttttagttttttgttttttattggaattttatttttatattttgaatttattttaaatttttggtttaattaggaattgttatagttaggttattttagatagtttttgtgagttattaggatttagagaatataatatattttttttaatttaaatatgtagttttagaaaaaaattattttaaggttaggtttggtggtttatgtttgtaattttagtattttgggaggtcgaggcgggtagattatttgaggttaggagttcgagattagtttggttaatatggtgaaatttagtttttattaaaaatataaaaaataaaaataaaattatttaggtgtggtgatatatgtttgtaattttagttatttgggaggttgaggtataagaattgtttgaatttgggaggtggagtttatagtgagtttagattatgttattgtattttagtttggtgatatagtaagattttatttaaaataataataataaataaataaataaaaagaaaaagaaaaaattattttaaaatttatatggaattaaaaatagttaaggttattttaagtaaaaagaataaagttggaggtattatgttatttgattttaaattatattgtagtgttataataattaaaatagtatggtattggtatataaatagatatatagattaatggaatagaaagagaatttagaaatgaggttgtatatttatagttattttatgtttgataaatttgataaaaataagtaatggggaaagaattttttatttaataaatggtgttaggataattggttagttatatgtaaagattgaaacggggtttttttttttatattatatataaaaattaatttaagatagattaaagatttaaatgtaaaatttaaaattataaaaattttagaagataatataggtaatattatttaggatataggaatgggaagagattttatgatgaggatattaaaagtaatgataataaaagtaaaaattgataaatgggatttagttaatttaaagagtttttgtatagtaaagaaaattagtaatagagtaaatagataatttatttaatgggagaaaagttttgtaaattatgtatttgatagagatttaatatttagtatttataaggaatttaaagaaatttataagaaataattttattaataagtgggtaaaggaaatgaatagatattttttaaaagaagaaatatatataattaataattatatgaaaaaagtttattattgattattagaaatgtaaattaaaattataatgaaatattattttatattagttataatggttattattaaaaagttaaaaaataataggtgttggttaggttgttgagaaaaaggaacgtttatatattgttggtgggagtgtaaattagtttaattattgtggaatatagtgtggtaattttttaaagatttaaaaatagaaatattatttagtttagtaattttattattgggtatatatttaaaggaatagaaattattttgttataaagatatatatatgtgtatgtttattgtagtattatttataatagtaaagacgtggaattaatttaaatgtttattaatggtagattagataaagaaaatgtggtatatatatattatggaatattatgtagttataaaaaagaataatattatgttttttgtaggaatatgaatggagttggaggttattatttttagaaaattaaggtaggaatggaaaattaaatattatatatttttatttataagtggaagttagattataatatatggatataaagaggggaataatagagattggggtttattggaggttgggaggagggtaaggattaggaaaaataattaatgggtattaggtttaatatttgagtaatgaaataatgtatataataaatttttatgatataagtttatttatataataaatttgtatacggatttttgaatttaaaataaaagttaaaaaaatataaaggtttagttggattagtgggtttttaggatttttttttagtaatattgaggtaaatagtataaattatgagtttattttttttataatttatgatatattatatttaatatttgttgagtttaaataagttttttaaatatattattagtttatattagttgtggaatttttgttttgttaattaggggttaataagtttatttatatttgttattattaattaatgtgtaggattgtgttttattaaattagtagttattttttttgtcgagaagtaaggagtatgttttttagaatttttttttttgtatagtttcgatttatattttttaattagagaaatttgtatgagatatggtgtttagaagagatggagagataggtttttatttattagtcgtggttgtaggtagaagagtaggtagatgttaggtttttagtggtttttgtgttaggttaaagatttatttgttttgtttgtgtagatcgagatgaatggtgggagtttttttagaggttttggagaatgattgtaattttttagtagggttttaggaattttttatttgtgttttaggttaagttttttagtatatgtttttttgattttttagttgtagtttttaagagttataatggtgattggtattagtattttgtttttgttgtaataaattattgttatgaagtggtttaaaataatttaaatttattattttatagttttggaggttagaagtttgatatgggtttttttggtttaaaataaggggttattagggttgtatttttatggcggttttgagggaaaatttgtttttttattttttttattttttaaggttgtttgtattttttggttcgtggtttttttttttattttttaaagttagtagttttattattttgatttttgattttgttgttatatttttttttttaatttttattttgttgttattttttttatttataacgattattgtgattgtattggatttgtttgaataatataggataatttttttattttatgagttttaatttaattatatttgaaaatttttttttgttatattaggtgatatttttataagttttaggggttaggatataggtattttgggagatttttattttgtttataatatgattttattaatatttgtttttttagattttttaatattagtataggttttaatttttatattgaatacgttatttttaaaatgttatattagagtgtggtggtttttttggaaaaagttatattaatatatttttttattttagaagagtttaaaagttatttttttattatttttttttttttttttttttttttttgaggggagtgtcgttttgttgtttaggttggagtgtagcggcgcgatttcggtttattgtaagttttattttttgggtttattttatttttttgttttagttttttaagtagttgggattataggcgttcgttattatgtttggttaattttttttttttttttttgtatttttagtagagatggggttttatcgtgttagttaggatggtttttattttttgatttcgtgaatcgtttgtttcggttttttaaagtgttgggattataggcgtgagttatcgcgttcggtttatttttttattattttaaagtttttaaatggtattattattttaaggtgtaatagttgtaatttaagtaacgattttgcgggggtgatggagggagataaaaagaaatgattggaaagtatttttgattttatgttttgtttttggtgtttggtcgttttggattttaggttgtagttttttttttatataaatttagttatttttgagtttttaagagtgttttataggatttatgtttattttttggttttgttattttttttttattttgttttatagtttcgcgtttatattttttttttatttattgttgtagttttgttttgattttttagttattgttttttttttattttgtgtatgtttaagttaattttttaagaagaaattttagatggttttttattgttgtttgtttgttattattttttatttggttgaagagtttttaagatttttaattttttatttttaaaattttagtgtataaataatatatgtttagagttggaaatgaaattattataatatgtataaatatattttaaaatattttttatttttaaatttatgtttattttattaaggtaatttatgttattaatttattttttatgtgtttattttttttatttttatataaatataggtatttatattaagtgttgagtgtttttattttgtagtttttttttagtaaaagtttttaaattttatttgtagtttaattattttataataatttgagatataatttatatattataaaatttatatatttattatatataagttagtggtttttagtatatttatatagttgtgttaatattattattattaattttagaatatttttattattttataaaaaattttatatttattggtagttattttttatttttttttaatttttttagttttaggtagttattaatttgtgttttatatttatagatttgtttattttggaaattttacgtaagggaaattatacgatatgtggtttttcgtgtttggttttttttatttatcgtaatatttttatggttcgtttgggttgtagtatgtggtagtattttacgttttttttattattgaataatattttattgtatggatatattataatttgtttatttatttattagttgatggatatttgggttttttttattttgtgttattattaataatgtagtcgtaagtatttgcgtataggtgtttgtgtggatagatgtttttgttttttttgggtatgttgtatatttaggaggggatagttgggttatatgttaatttagtgtttgatattttgaggaagtgttggtttgttttttaaaggggttttatttttttatatttttattagtagtatatgaagtttttagtttttttgtatttttatcggtgtttattattatttttttattgtagttattttagtgggtggttataattaagggaaaaaattaaattttaaagaattaatttagttttatttggaaattttattgaggattatagacggaggtttataatttaagaatagttttttagagaggttttattagattgtattagtttagtattttagtttattgtttatattataggtgttttgtattgtaatattatattatatttggtaagaagttatattaaagtagaattatattaaagtttggaagtaggaatacgtttagtgtagattatagaagtatgattattatgttcgttagatattattttatgtgtagggaaaagtaagggtatttattttttaaggaatatagtggtttaggtaagagacgttgggggttgtgtgttttattttgttttgtttttaaagtatttttttagagagttgtatatttttacgatgaattaggaggatgtgtaatttttatagggattttgtgaaattatgttggtaagtaaaagttagtttttgatatttattattttgttttatagtgtgaaatattatcgtattgtagggtcgatttgtatttttttgatggttaatgatgttgaatatgtttttacgtgtttattggttttttgtatatttttattggagaattgtaaatttaaattttttatttttaaatttgattatttgtttttttattattgagttataatcggttttatatattatagataaaatttttttttttattatatgtatgatttgtaaaaatttttttttattttgtggggtttttttttttatttttttgatggtatttgtaaatatataaaagtttttaaatgcgatgacgtttagtttattttttttttttttttttgtttatgtttttggtgttatatttaagattaggtgtttttatttaatttaaagttatgaagatttatgtttatgttttatttttttttttttttttttttttttttttttttttttttttttttttttttttttttttttttttttttttttttttttttttttttttattttttttttttttttttttttgagatatagttttattttgttatttaggttggagtgtagtggtgtaattacggtttattgtagttttaatttttttaggtttaagtgatttttttattttagttttttgagtaggtgaaattataggtgtatgttattatattcggttaaattttgtattttttgtagagatagggttttgttatgttgtttagtttggtttattaatttttgggtttaagtagtttgtttattttggttttttaaaatgttgggattatagatatgagttatcgtgtttggtttgtttttttttaagagttttttaatgttaatttttttatttaggtttttgatatattttgagttattttttatatatagttttaagatttttattttttattttttatttattgatattgtatagaaatataattgatttttatattttgattttgtattttgttaatgtgataaaattttttagttgtaatgtttttttaaagtaaatttttttggatttttatgtataagattatattatttgtaacgaaggtagttttatttttttttttttaatttagatgagttttattttatttttttgtttattgtagtaaaaaatttaattattttatttataatgttttgttatttgatgttttttatttatattgtgaatattttattaattttatagagaaagtttgagtttattattttaaattttaattttatagtattttgtatgtaattgtttttttagtgtaaatatttagatggttttttttagttgttattatattgaatgtttattgtatagatatttttatatatatatttttatagttattttagagttttttgattttttatagtattatatgatagtggttaatttgatgatttaattgattagttaggtagattgattgattgataattttattgtttttgtatataaagttagtaattatatttggaatttagtttttttaggtttagttacgtttatttttttagttttagaggttttttttttgtttttaaatttttttgtttttgaaattatttttgtattttagtttaagagcgtttgtaaataggtagaaggtattatttggagaaggtaagtaagagatttatttttattttttttatatttaattattaaattttttatttagtttagttaggttgagttgaaaatattttgattttagttatttagttattgagtatattatagttttttttatattttagttttatttaaatatttaatttattaagtttatttataaatgttaagttttttatttggttatttttgattttatagttttaaagttttttttattttgagaatatgtttttgttaggttagtttttttattgttttttgattatttattattttgttcgtttttgcgtttttgtttattttgaattttttgttaatttttaagtgttagtagttatttttagttgtaatagagtggattttgtttaattttattgtttttttaatttttttagggtattttataggtagaatttttttttttgtggtttttaagttggtttggatattatattttaaagtttagaatgtagttatgttaaattttacggagaattttttataagtaattatttttggtttttttttaggtttatagaattaattttcggaagtagaatattttatttttaaaaatttttgggggattgtgagtagttagttaatggatttggggttggtgtttattatattatattttaagtttttttagtttttgttttttttagttagttaatttgcgagttattttgttttttatttttttttttgtgagaggttaggtattatgttttggtagtttttttaaatatttttttatatttttagttttattggtttttttttatttatggattttttattattttatttaatggataaaggtttgtgtttatgtttttgtttatgtttttttttattttttttaaattttaattttcgtatatgtatttatttaataagtattgatagtttattaattggaggaattgtattaggtgttatgatttaatttttttaaatatgttttttatatttttatatgtatttaaaaaattattgtatcggggtgatagaataaggttttaaaattttaatattagattgtttattatattgttttagtttatttttttgtttagttagttaattattaggataagaagatattattaatttgattttttttttatatttttaaaggagaggagagagaataatttggaaggttaagaagttggtatgtttaggagtttataatttttatttttggggttttatggaatatttttaggttttatttatttattagtaaaaaaaaaaatagaataatgagtttttttttgataattgtataggattgtaaggattaagtgtgtttatgtgtatgaagtattatgaatattatatataatgtaattgtaatagaatatatatagaagtagaaattatattttgaaatgataagtggtagaaatatatattgaaaaatattagtggaggatgttataaagtttgagttatttgttttttattttattttaaaataagtatatttgagtatgatgagttttaaggattttttttagggtaaaaattgaggttattttattgtagttgtttagtttttttataggatggtaaagtatagttagtatttttttgaaatgtttgtttgtttatgttattaaattttgaatttagttttttagaaatgagtttataatttattttttttgaaggtaattttagagtatttatgaaaagatatttataaaatatttttgtaaaaatatttaatatattaaatgtgtgtttattatattttattaaagtaaagtgtaaaacgtttttagggatttgtagagttaaaatgttattttttatgtttaagatatatgttgaattttatgttcgatttttttttattattggatttaattttgtaaaatatgaggtttgaattttttatgaattgattggtgtattttttgtttaattgattttttttatttgatttggaggatggtgttggttagaggtttttttttgcggaggtttttaaagatatttatttagaagaatgtattatatgaggtatttgattaataaaaatattgttattaatattgataataagtaaatatatatttttttagttgttttgtaattggtatatttttttttttttattgaggaagtatttgttttatttttgttttagattaaatattttgaaatttttagttttaatattattgagttttattattattgaaataattttttttttaaaatattagattatatttaaattttagaagatgtttttaattaagattaatattttgatattaaaggaaatttgtggataagatattgggaatttttgaaaaattttagtagggttatgtttagagaatttttatgattttaataaattttgtttatttagtaagtttttagagagtttttatgggaatttatgaaaaagaaagtttttaatgtattatatggaaaataacgatagtaataattataataataatagtggttgtatttaaagggtatttgttgtattttaggtattggtttaagtatttatataagttattttgtttagtatttattataattatatgaaaaaaatgtttttatttataataaagaaatgaagtttaggttgggtgttgtggtttatatttgtaattttagtattttgggaggttaaggagggcggattatttgaggttaagagttcgagataagtttggttaatatggtgaaattttgtttttattaaaaatataaaattagttgggtttggtggcgggtgtttgtaattttagttatttgggaggttgaggcgggagaaatatttgaattcgggaggtagaggttgtggtgagttaagattgtattattgtattttagtttgggtaaagagagtaaaattttgttttaaaagaaagaaagaaggaaggaaggagggagggagggaaggaaggaaggaaggaaggaaggaaggaaggaaggaaggaaggaaggaaggaaggaagttaagaagtttataaagtataggtaatttgtttaagaaaattaggtttagaaagtttaagtaatttgtttagggtaatataattatgaagatttgaggttagaatttagttttaggtagttttgttttagatttattgttttttagttattatagtgttatgttaagattggtttaaagtcgtgttttttgtttaaataggtttttttatggtaatgattatgaaatatatggttaataaagtattaggggtaggaagagggggaagaagaatgtagtatttgagattatggttattgattatatttaaaattatagttttatgattattaaggttttttttaaatttttttttttgatgtattatggtatttaggtgaaagaggatttggttttttatattttaggacgtgtagaattgtttatggttttgaaagataaattagtaggttttattatttttataaatggtaattttattgtggaaaattgtattagtgaaaattttatatatgattttgtatatgtattatttataaggatttagtaatttttggaaagatgatatagaaagatttatagaatattttttttatatgttttatattaaaatgtataaagtaaaattaaattagataatattatgatttagaagtttattttgaaattttagattagaatgtaaagaaaagaaatttagtattattgtatggataagagagaatggatatagattttaattaattatatatttttttaaaatttatatgttgttttttttaattttattttaatttaaatttaattatatatttatttttatttttgatttttattttgtatttatgtttttttttattttgtattttttaattaggatttcgttttttgtttgaagtatattttttagaattttttttagtaaaagcgtgtttgtgttaaattgtttttgtttggaaaaaatttattgagatttgatttttatattattatgtattttatttttaaatgttttatatttgtttttttaattttttttgaatattatttgtagtttttgattaattggaagttttttaaagtttgttttttaattataggaagtagggttattttatgttttatttttattattttgttgtatggtgtttttgtttgattttttatggtgatttgtattttgtaaatagttttgttgttgtttttttggtaagtgtttattttgtttatggaataattttaggaaattttaagtgtggttgatgatatttttttttagagaggatttgtgtttgttttgcgtgttatttgcgtttgttttttgataggttttttggagtttggtttattataaattgaatttataatttgatgattgttagataatttaggtagtgagaatttgggttgtaaatatatgtgtggggttattgtgtttatttttagttttatttagtattaaggtagttgtttttgtagttttttgagtatggggtattttttttatatcgaggaattgaatttaggggttttagtaaaatggaggagattattttaggagattttttattttgagtgttatttgagatttgttttttattttaaattttttatgaggttatggaaattaaagtttaatttgtttatattgagtaaatgagtttaggataaaagtaaatttagagttttttgatatttattagatagtttttattgatgtgaaagttttttagtgtttttatgatgtattttattttttgataatttattttttgttagtatgagagtaggcgtagatatttaatatgttatattagtggtttatattttatttttaaagttttttattataaatttttttattttgtttttttgaagttattgaatatttgagtaaattattagttattatttatgtattgatgaggatttaataataagatatttttttaggtaaaatgaatttttagatggtttgattgaaaatttttttgttggaggtatttttttttttatttttttttatgataatttttgaaaagggttgtaatgttgtaaagtatatttttgggtatttaaagtatatttaaatttttttttttatagttaatagtttttagggaattttttaagattttaaggatgagataagggagagtggatttattagtggtaataagaatattaggaatatagtatatattatgaggtaatttggttggttttgttaaggattagtttaggtttgatattgtatgtatatatagtatatatatttatttttttttgaatgtttattgagtgttggtgattataagtgaataaataaaatttaggttatggtggatattttaagttatttggttatttgttgtattatgattatggtatttagaatttattagggtttagtagtaagttaggaattgttatttagtagaagaataaagaataaagttttttttcgaagttttggaatttgagtagtgagtttttatgtttgttttatatatatatatatatatatatatatatatacgtatatatatatatatacgtatatatatatatatatatatatatatatttaaggaagtatttaggttaaatggtagatatgtttgatgtttgtttggattagaatgatatttttattttttatggaatgttttgaatttgtattaatttatcggattttggtgtagagaaatttttttataagataagaaattatattttttttttgttgaaattatttatttttattaacgtttaataatatcggtgtagttattttttaaagagtttgtattttaattttggaggaattttttgagttgaaaagtttagggtttgaataatgagggagttttatttttaatagtttttaattagttgtaggattgaatgaagatatatgtgattgtatgattttaagagagggtaggggagagggatagtgtttgttttatatttaattgaattatttttttggtttttatttaaatttaattgtagtattggtgatttgatttatagagttagaaattttttaggtatggaatgtgttgttttaaatagtaatgagtttaatttatgtagagtgtttttttttattattgggggttatatgaagttagcgatttttttagaaatttggggttataaatagaaggttttaatttattttaatttgaaaaatttgaataaggaatttttggtgtttggatttttatttgttttataaaattgaattgtgagttgtgatatttttttttaaaagttttttttaggatagaatttttggtaatggtaatatgaataggtagattagtaagtttttttttaaatagtaatatgagaattggataaaattataaaaataaatatttgaagttattggaaaataaataaaggcgagtagaaatgtaatagtgttttgattttgagattatttattgggtaaaagttgtaagttggtggttttttttttttatttatgagtttgttttaaatttttagtaggtaattgtagttttaatggattaatagggtagtttatagagttaaaagtttaaataagttaaaaatgtttatatttttatatgtttatattagttaggtaattttgaaagagatttgttgaagaatttagatttaaaatttgaatataaattatgtttatatttttggttgaatattaaattttttatgggtgtgggatatttaggggaatttggggaaaaattagaaagaatttagagtgaggtttatttttgaaagagtgaaataattttggtaatatttgaaagtttgtagtaatatagattgtttgtatttgttaatttgtatataatataggtagaagaaagtaaaaattttattggattgaggggtgaaaaggtaggatgtaggataatttagaggggattttagaagtaaaataaatatagagaagttgaattgtaaaattttagtagaaatagttttagtatttgttagtttatgttgtgttgttataaatatttgagagtgggtaatttataaagaaaagaggtttatttggtttatggttatataggttgtataaatatggtattagtatttttttagtttttggtgagattttaggagttttttatttttggtggaaggggaagggggattaggtatgttatatggtaaaagaggaatagggtgggaggagttagatttttttaaataattaatttttttttaaaataatagagtaggggtcggatgtggtggtttatgtttgtaattttagtattttgggaggtcgaggcgggtggattacgaggttaggagttcgagattagtttggttaatatggtgaaattttatttttattaaaaatataaaaattagtttggtatggtggtatgtgtttgtagttttagttatttaggaggttgaggtagaagaattatttgaatttaggaggtggaggttgtagtgagttaagatcgtattattgttttttaggttgggtaatagagcgagattttgttttaaaataataataataataataataataataaagcgaagagaatttatttatgattgtggggagggtattaagttatttatgagggatttatttttatgatttaaatagtttttattaggttttatttgtagtattggggattatattttaatatgaggtttggtagggataaatattataaagatgtagagtagatatttagagttttttgttgaaaatgtagtaattggatatcggtaaatagagtagaaatattagttgtagttaattgtaggggtaatagattttatagttattagtgtagggaaagttaattacgtttattgaggggtaggggtggtggtggtgggagaattgttatttttagagagattgttgtagattttagattttttaaaataaaatatataatgtttattttattaaataggattagatatagaaagaaaagaaagaaatgtgtgattataataaggaggaaattaaaaataaatgggttttaatgggtttagatattgaaattattagtaaattttttaagatagttttgaaaaatatgtggaaagaaatgaaggaaatattatttttaaagagtgaatagaagtaattgtagtagagaaatgaaaattatagatggtattaagtggaaatttttaaattggatagaaaaataatgatagtgttttggatgaggttaatagaagttttgagatggtagaataaagaattagttagtgtttttgaatataaattaatagaaattgtttaatttaaaaataaaaaagagtgaaataagattaaagaaaagtgaagaaaattttataaatttttagaaaatataaagtaggtaaataggtgattaattggagttttaaaagaagatagatataggattagaaaaaaaatttaaaaaaatttatggttgaaagatttttaaatttgatgaagaattttagtttatagatgtaagatatttattaaagttgaatatttatatagaaaattataggtagagtggttatggttttggttggtttgagggtgtgtcgttagttttgttgtatgtggtgtggtgtagggtgttagtgtttggtgggattagagagtttttagtatagtttttgggtaggtgggatcgtcgattattttaaaataattttttattgatttaatttatattttgagtttaggtatatatgtgtaggtttattatataggtaaatttgtattatggggtttgttgtatagattattttgttatttaggtattaagtttagtatttattagttattttttttgattttttttttttttttagtttttattttttggtaggttttagtgtgtgtagtttttttttatatgtttatgtgtttttattatttagtttttatttataagtgagaatatgtggtattcggtttttttttttcgtattaatttgttaaggataatggtttttagttttatttatgtttcgtaaaggataagaatttatttttttttatggttatatagtattttatgatgtatatgtattatatttttttaaaagagagtaggagtggttatttttatataaaataaaaatagattttaaagtaataatagtaaaaaaaaaaaaaaagataaagaaggatattatataatgatagaatgataattttaataagaagatattatagttttaaatttatatgtatttaatagtggagtttttagttttataaaatagttattattagatttaagaaatgagatagatagtaagataataatagtaggggatattaatattttattgatagttttagatagattattaagatataaagttaataaagaaataatgattttaaattatattttataataaatggatttaatagatatttatagaatatttttttttagtaattgtagaatatatattttttttattagtatatggaatattttttaagatagattatatgatagattttaatataagtttaaataaatttaagaaaattgaaattttataaagtatttttatagattagagtggaataaaattggaaattaattttaaaatgaaatttaaaaattgtatgagtatatggaaattaaataatttatttttggatgattttttagttaataatgaaattaagatggaaatttaaaaattttttgaaatgaatgataatagtgttataagtaattaaaatttttgggatatagttaaagtagtgaaaataagaaagtttatagtaataagtgttgatttaaaaaagtttgaaagagttcgggtatagtggtttatgtttgtaattttagtattttgagaggttgaggtaggtggattagttaaggttaggggtttgagattagtttgattaatatggtgaaattttgtttttattaaaaatataaaaattagttaggcgtggtggtacgcgtttttaattttagttatttaggaggttgaggaaggagaattatttgaatttaggaggtcgaggttgtagtgagttgagattgcgttattgtattttagtttgggtaatagagtgagattttatttgggaaggaaaaaaaaaatttgaataagtataaattgaaaatttaatgttatattttaaggaattggagaaataaaaataaatgaaatttaaagttagtataaaaaagaaataataaagattagagtagaaataaatgaaattgaaataaaaataatataagagataaatgaaaaaaaagttgggtttttgaaaaggtaaataaaattaatagattattggtgaggttaattaagaaaaggagagaagatttaaataagtttaattagaaaataaattggagatattataattaatattatagaaatataaaagttaatttaaggttattatgaatatttttatatatattagttagaaaatttaaaaattgataaatttttggaaatatataatttttttagattaaattaggaagaaatagaaattatgagtagattaataataagtagtgagattgaaatagtaataaaaaaaattgttaataaaaaaaagtttaggattagatgggtttttagataaattttattagatatttaaaaaattggtattaattttattgaaattattttaaaagatagagaaaaagggaattttttttaaattattttatgaagatagtattattttaatgttaaaagtaggaaaggatataataaaaaagaaaaatatagattaatatttttaatgaatatatatgtaaaaatgtttaatataatattagttaattaaatttagtagtttattaaaaaaataatatattatgttgaagtgggttttattttagggatgtagagatggtttaatatatgtaagttaataaatgtgatatattatataaatagaattaaaaataataattatatgattattttaatagatgtagaaaaagtatttgataaaatttagtattgttttatgataaaaatttttaataaaataggtatagaagggatttattttaaagttatgaaagttatatatgataaatttatagttaatattatagtgaatggggaaaagttgaaagtatttttttaaggattgaaataaggtaaggatgtttacgtgtattatttttatttaatatagtattgtaagttttagttagagtaattaagtaagagaaagaaataatgggtatttaaattagaaaagaggaagttaaattgtttttgtttattgatgatatgatcgtatatttagaaaatattaagatttatttaaaagatttatagatttgataaataaatttagtaaagttttaggttataaaattaatgtatataaattaggagtattgttatatattaataacgattaagtgagaattaaattaagaatttaattttttttataatagttgtaaaaataaataataataataataataaaaatttttaaaaaaataatattttttaaaatttaggaatatatttaattaaggaggtgaaagatttttgtaaggaaaattaaaaaatattgttgaaagaaattatagatgatataaatatatggaaatatattttatgtttatagatgaatagaattaatattgtgaaaatgattatattgtttaaagtaatttatagatttagtgtaatttttattaaaatattattattattttttatagaattggagtaaataattttaaaatttatgtggaattaaaaaagagtttacgtatttaaagtaatattaagtaaaaataataaatttggaagcgatttattaatagattttaagttatattacgaggttatcgttattaaaatagtattatattggtataaaataggtattttagttgggtacggtggtttacgtttgtaattttagtatttcgggaggtagaggtagataaattatttgaggttaagagttcgagattagtttagttaatatgataaaatattatttttattaaaaatataaaaaaaattatttgggcgtggtggtgggtatttgtaattttagttatttaggaggttgaggtaggagaattatttgaatttgggaggtagaggttgtaatgagttgagatcgtgttattgtaatttagtttgggtaataagagtgaaattttattttaaaataagataaaataaaaaataggcgtttagattaatggaatggaatagataatttagaaataaagttagatgttaatagttaattgatttttgataaagtatataaaaatataaattgggaaaagtatattttatttaatagagagtgttgggaaaattggtaagttatatatagaatgaaattgtatttttattttttattttatataaatgttaatttaaaatggattaaagatttaaatttaaaatttaaaatttaaaattataaaaattttagaagataatatgataatattaaaaaatttttttggatattggtttaggtaaaaaatttatgattaagatttcgaaaataaatataataaaaataaaaataaataaatgagatttggttgaatgataaagtttttatatagtaaaagaaataattagtagagtaaatagataatttatatagtaggggaaaatatttatagattatatatttaataaaggattaatatttagaatttataaggaacgtaaagaaattagtaagaaaaaaataaataattttattaaaaattgggtaaaggatatgaattgatagtttttaaaagaagatatataaatagttaataattatgaaaaattgtttaaggtaattaattattagggaaatgtaaattataagtataagatattattttatttttgtaaaaattgttataattaaaaaatttttaaaaattatagtagatgtttgtgtggatgtggtgaaaagggaatatttttgtattgttggtgggaatgtagattagtaaaattattttggaaagtagtatggatattatttaaagaattgtaagtagatttattatttaatttagtaattttattgttggatatttatttaaaggaagttattatatgaaaacgatatatgtacgtgtatgtttatagtagtatattttacgattgtaatgatatgaaaataaagtaagtgtttatcgattaataagtggataaagaaaatgtggtatatgtatattatggagtattatttagttataataaggaataaaataatgtgttttgtaataatttagatggagatggaggttattattttaagtgaggtaatttaggaatggaaaattaaatattgtatgtttttatttataagtgggagttaagttaggaggatgtaaagatatatagagcgatataatggattttggggatttaagggataggttgagaggggagtgagataaaagattatatattgggtatagtgtatattgtttgggtgataggtgtattaaagttttagaatttattattaaagaatttatttattaaattaaaatttatttgtattttaaaaaattattgaaataaaataaaattttatagggtaaataataataaaaataataataataaagaaaataaataaattatataaaaaatatttaagatttttgaaatttaagatattagaaattaagagatattgtggaaagagtatatagaagatttaaataaatagattttttgtttatggggagtaagatttaatattgttaaaatgtaatattttttaaattaatttagagatttaaaaaaaaattaataaaattttaggaggttttttgatagaaatttatgagttgatttataaatttatatgaaaatataaaaggtttagaataatttatgtaatttattttttaaaaattttagagaaagagtttttttatattattttatgttggtttttaatttttgggtttaagggatttatttattttagtttttcggtagttgagattatagttatgtattattatgtgtagttaattttttatttttttttaggataagttttgttatgttgttcgggttagttttgaatttttgggtttaaggtgtttttttattttagttttttgagtagttgagattataggtatgttattatagttagtataatttaagtaatttttaaaaagatgaataaagttataggagttattttgattaaaaaagttgagataatttattatgttaataaatatttttgtataattatatttattaattatttttaaaatttttgttttatatttttgtaattttgggtttagtggattttttaggaaagaaatgtttttattaaataagaattttagttggttattttatatttttataaaatatagtggtatgagggttttaatttttgtttattttttttaatatttatttttattttaaaaaaattattattatagttatattattgtggtttaatttgtatttttttaatggttaatgatgttgagtatttttttttgtgtatattggcggtttatgtattttttttgaagaaatgattttttaatttttttgtttattttgtaatgggattatttgttattttgttattgatgtttaaagggttttttgtgtatttaaatatttgatttatatgagatatgtaataggtaaatattttttgttattgtatggattgtttttttattgtattgatagtgttttttgatgtataaaagttttggtttgatgaagtttaatttatttattcgattttataattatatttagggtaggattaggaaaataaggataggagacgtgtaggggttggattatttttttttttgggtgattggaggtttgtttttagtagttttttttttttgatttatgatttttgggaatcgggtttttatttttagaattattaaggtgatgattggttttttatttttataagtgttttacgttatagaaattttagtaagtagggattatgattgggtaagtatgagtgtttgtgttttgtgtgtgtgtgtttgtgtgtgtggtggggggcggggtatgtggggtatattttattattaatgtagaatggaatatgataatgtagattttagtttttatatattagagtttttttttcgttttatcgtaagtgtagttattatagtttaagtaattatatttttaatgaaatttgatagtgtatattagagtattttagtttttaatttttttaaaagtatattatgttatttatagattgaatatattaaagttgtttttatatggaagttatgaatttgtttatatgggttttagatatattattgaaatatagtatgtttaagaaagtttaattaatgtgtatttgaataattatagtgtatagatattaattaaaatatgaattattagtttatagtattaagtttttataaatgtatattattgttgttaatttatgtttatattttattggaaatttggtataatattttttttattttggtgaatgtaagaaggtaaataagttttgagtatttattttaagttgtatttattggatattatatatattaagtattttatagatttagtagatatattttaaaaattataaaataattaaattttataattttatcgtattagtaatttttatttttttataatttgaaataattttatgttttttaattttcggatttttttttttatcgtttttttttaggttaaatatgtatgaagtttttataattttggagtgtagatgttttaagtatgattaaaatgtgaaaagtgatgaagaatgatgataattattttgattatttataaattaaaaaaaatttttttggtatttataaatatagaaatgtataaatatttttttataattaattttaaagatatgtaaatagttgatggataaaatagtaataatgtgttaatattttttagtttaaggttatttggagtatatttgtgggtgaagaagttgggtttattatttattgtagtgggagggagaatgtatattttggataattatcgagtattttggtaagtgttttttagatagagtttattataatatttgggttttagttggtattttaagtttttttgggatttaattaattagtagttatgattgaatgatgatatagagaggtttatgttattgaaaaaagagtttattatttattgatataggaagtatagtataataggtagtattaaggttggttaagtggtaacgggaggggaaagtatgggcgagagtttttaatgtggtttttaggggaatgaatgagtaaggtagggtaagtagtgtagatatgtttagtattgatgagtttgaataattttggtgattttgaggtatagggattgtttttagttgtttgatatttgttttttagattattaagataggagaatattgattgggagtatcggggttatgtgatagttagaaaaaaagaatttattttgagtttgggttttggtttggttagtttgtataagaaaggcgtatttgcggttaatttttttagtatttgtaggaatagattagttttgggaggggagtttttataattagtgaggatttagatgttagagtatgagaataaggaaaaaaagaaaatatagataatatagttgagaaattttattttattttattgttttagattgagtattgttagtaagtagaggtaattttataattcggtattttaataaattttatttttagggagggtggattagagtgtagataaagtttaattcgtagagaagtattagttatttatattagtcgggagagggtttagataaaattatgaagtatttttgtttcgttttatttttttatgggttgagagtgatttagtgtggtgttggtattttgtgatataatttatgttttagagggattaatatggtttagtagtgaagattagattagtttttggtaatattgatgtttagttgtgttagataagtttttagatattaggggttgtttttttttgattaaatttaatatttaaaaatattagtattacgtttgagaaatgattaagaaatgttatatagttatattagtaataaatatgtgtaaaaaataagaatgtagattataaaatgggaattagaattaaaatttattagtttggtaaagatagaagtaaatgatggtagtattgattagagtatagggaaaatgtattgttacgaagattgatggtattgaaaagtggtataaaatttttaaagggtatttttgtaaaatgttttaataatttaaatgttttgacgtttttgagatagagttttgttttgtcgtttaggttggagtgtagtggtataattttgatttattgaagtttttattttttgggtttaagcgatttttttgttttagtttttcgcgtagttgggattataggtgcgtgttattacgtttagttaatttttgtaattttagtagaaatggggttttattatgatggttaggtttattttaaatttttgattttaagtgatttattcgttttggttttttaaagtgttgggattataggggtgagggattgcgtcgggtttaagtgttttgatattttgatatgaaaattttttttttaggaatttattttaaggaaataattatatatttttttaaaaacgtatatataggtcgggcgcggtggtttatgtttgtaattttagtattttgggaggtcgaggtaggtggattacgaggttaggagtttaagattagtttggttaatatggtgaaatttcgtttttattaaaaattataaaaattagtcgagcgtggtggtagatatttgtggtttcggttattcgggaggttgaggtagaagaattgtttgaattcgggaggtggaggttgtagtgagttgcgattatgttattgtattttagtttgggtgataggtcgagattttgttttaaaataaaaataaaaaaattatatatataagaatgttttttgaattgtggtttataaaagtaaaataatggaaataatttaaagattgtaatgaatatagtgatgatagttattaataatggagtatttagtatgatttagaaaataatgttatggttttatatagagagttagatttaatttttaatgtaaatttatggggaatttaatatgtgattttttgtatagatagggaaggagagaggtaaagaaggtggtggggttagggttgaattttggagatttttttttagaggttttgttgatttgttttttattgattttttttttatttgtattttatataagtgaattgttttgatgttttagaatgttttatggataggaggttattggtttagagtttaggaagataagaagggtaatgatttaattgttaaatttacgtagaagttcgtttatttagggtgtatttttagtgattaggagatttgttaagtatttgaggatataatgaagagtaagagtaaagttttggagatggggagtttttaatattgtaaggaagataaatatttagtaaaaattgttttaagattgtgaaattgttaatgagcgtaagggaaaagtttgtgatattatgaaagtaggttataaggagatttaatgggtttttattattattattaattatgtgtgaaagatgtaagaaaataatagttatgagatttgaataaatttataaataattttatgtagagaattagaaagagttttggaattttaaaatatgattattgaaataaagagtttaaaaaatgaattgaaatgaaagttgtgtgttgtaaggtagtataaaataaaaacgtgatgttaagtatgatagaattttaagaatattatattattaattaaggaattttagtagttttataatataagttttaataattatagaaagtaattaaaagtaatttaagaaaatgttttgaaggttattgataaaaatgtatagtgtgaatggttgtaataaagtttttaatataggagatggaaatagatttatattaagatttatgataataaaattttagagagtgaaagatagagtaagattaatggataaaggaatggtaggaggtttggtcgtgtgtgtgtattttttttttttcgtttgttattgtttttttttattaggtttgtagattatttgtgatgatttggttttttgttatttttagttgggtaaattttattatggtgatatacgggatggtagaagtgtaaggtttcgtttttgttggatgagttttttggagattgttttagggttttttgagaatttttttaaaatttggtttacgggtatgtattattttagttattttttttttaagtgaaaaattaattagaggagatgatttattttaatagttttattgtaggagaggaaggtgaaaagtgtttttatttattggtttattagttataatgggtagaggttattgagcgagtagcgggtggtggtagtgatgattatacgtttttacggtagcgtaatatttttgagataagtttttatttttttattaaatatgttttttttacgtgtagaaaatgtggtttcgtagtttttttttttagtgttggattgttggtattttattttttttattagagatatgaatatttttgttttttttggatttttaagattttaggttttttttagggagaagttgtttagggaggtttttgcgtggatcgagttttttttgagggtttgtttggtgttttaattgtggttgattgtttttcgcggggttttaattttatatttagaggtaaggatagatgtttttagttttattttataatttttatatgaaatttgaggttaggaattttttttaattcgttttaaagggttttatatttatatttttgattcggaaaataattaagtgtgcgtttgaatatgtttttttcgtaatttattttttggaggggaatatattgaaaatttagtttatttttagatattgagtgggattgaaaagttgaattgtttgtttttttgtagggtatatagaggaattggttattttatattattttgatatttttagagaagtatcgtttttttttagtaggatatgagtaagattagtgaggagttaatatgtagtttttgggtatttttggggttgaaggaaagatatatatgtttttttgatgtgtggagttttgagggtagtgtttaagattttgtatttttcgaagtatttgtttattgagtaagtgtttttgtttgttgtattatgttaggggatatggaagttattttttatttagttaaatatagatgtaaatgagatgttttgggagaaagtagaaaaagttttttttatagagttttttattttattattttattatatttgtttgaggttataattatatttttttttaataattttttaatgagaaaattattaaaagggtatgtagtgagtgatagatataggataaatgttgtaagttagtgtttgatgaaagatattggtgttttaggatgttagagttttttgggtgttagtagggaggtggttagggattttatttaagaagtagaaagaagagttttagggatatgaggatgttttatagttaaggataggatagtaaagggtttcgtgtgagtgtattatagaggtttgttattgtttagattttaaagtttagtatttagtgtggtatgtggtaagattttagtaaatatattagttggttggatgaaggagggtaggtgtgagtcgataaggaaaattttgtgatttttgttgggaaatgaatgtaaaagtgttgatgtattttttttgtaaggagatagaaaggtagagagtagatagatgtatgtatggatgaatgtatggatggatggatggttggatggacggatggatgtttattttttgtgtgtgtttttatttttgttttgtttttttgttttgtttttggttttgtttgtatttgttattgtttttttataattatgtttttattattattagtaatattttttatttggttttataggattttgtttgtgttgtattagtggttaaggatagaaaaaagaaagaagtttgtggaaaataaaataaaggaaatagatgtttttgatatgcggtagtggaaggatgtgtggatttgaggtttttagggagataggggttgcgttttattgtaaagtcgattttgttgaatatagaggggaaacgcgtttagatagttttgttcgtgttgattagaagggagggttgcgtttttagatttttttttttgtgtttttttagggtttagttttgagagttttagggttttatttttttagttaggattttaagattttattagagtttagttttaggaagtttgtagttatagtattgggttagattaagttgttgttatgaaaagggatttgaaaatttttagaggagttttttagtttttttttatggttttttatgtttttttaaaggtatagttagagatattagaaatgaaattgtatataattatatggatttttcgataattattgaaatttttgtaagtgttagttatattttggtaattttattaaagttaggtgtgtttagggtagttagtttaggttttggttttttatttaggttggattttataagaatcgtattcgcggtgagaattttagagttagattttgttgttttataattgttttacgttgtaagataagtaaatttagtttgagtttgtggattttagggttgtttaggaggaatttttattttcgcgtggatgattttaggtttcgttttttttgttttatttagtttttatttagtgtttgagagcgtttaattagaatgcgagagtagcgcggcggcgttttcgtgtggttatagggacgaggatagaggatcggatttcgttttttttttttattaattaggattttcgaggttttttttttgtttttagtatttggatagggttttgtatttaaggagttttcgggttttaagttaggttttgagtttatttagttttttaaaatttatgttgataatgatatttttttttattattgagtgattggatttttgttttagagtagagagaggtttttagggtaaaatagtgggattagatgtggggatgatatatttttaaatttttgttgttataggatttagttttttagtttttagatggggttttggtttttcgtttttttttttgtttttgttgttagaggttgtttattttaggaattagtttgttagtttttaattttggggtttagggatagtagtttttagtgtttcggtttaggaagaagggaatttttagagagtagaagagagaagaaatggattataagagaagggggtaaggggggagaaagagagtgaaaggagttagggaggagagaaaaatggaaaatattttgttaggaatgtgtgtgtttgtgttgatgtgtgtgcgtgtaggtgtgtgtagagtgggagagagtttttagggttttgaggagaagagagttgttatataggtgttaaggggtttagttttgggaattttagggtttcgttttttgagttaggattttaaggttttattagagtttatttttaggaagtttgtagttatagtattgggttagttggacggttgttttttttttgtttttgatagtaggagttgttatgttaggtttaggggttttggggttatgggtagagagtaggtttttttgttggtagttaaggagatgttgtttttggagggttaaagatttatttagttgggagtttgaaggtggttatgggttataaaggggttataaagagtttagcggtgagtttggtttaagtttttgatttttttttttggattttaagggttgattatggatttttaatggattttaagaattcgtttatttattttttgttttagattttttttatttcgatattttgggatttaggtatttgtttttttttttttttttcggttttttaagtatttttaggttttgttttttgttaatttgaattttaggattttgtagttttattttaaaattgtttgataatatagtgattttatttttagtgttttgaaaattttttatattgttttttatagttgttgtattagttttatatattgtgtgtaagagtgtttttttttttatatttttataaatatttatttgtttgtttgtttttttttgtttttttagttgtatttattttatttgggggtaagatgatattttattgtggttttgatttgtatttttttgatgataagtgatgttgagtattttttatgtatttgttggttatttgtatgtttttttttgagaaatgtttatttatgtcgtttgtttattttttaatagaattttttggtttttttagtttttgagttttttatatattttggatattagttttttgttagataaattgtttgaaaatatttttttttatttaataggttgtttgtttatttttttgatggttttttttgttgcgtagaagcgttttagtttattatagttttatttgtttattttgtttgggttgtttgtgtttttgaagttttagttataaaatcgttatttagattaatgttttagaatgttttttatatgtttgtttttagttgttttatagttttgggttttacgtttaagtatttaatttattttgagttgatatttatatagggtgagatatagggatttaattttatttttttgtatgtggatatttaatttttttagtattatttattgaagagggtgttttttttttaaatgtatgtttttggtatttttgttaagaattagttggttgtaaatatatggatttatttttagattttttattatgttgtattgattgatatgtgtttgtagagacgaggttttagtatgttttttaggttggtttagaatttttgggtttaagtggtttattttttttggttttttaaagtgttgggattataggagtgagttatagtatttggtttttgtgttgtgttttgatttatcgttattttttaagtttttttttagtattgatattttattaaatattttatgattaaattatatttttatattttgagataaataaaaaattatataagcggtaaagataaatatgaaaaaataaaattattattaatgttattaggaggataattttaaaatatttgagtaagaaaattttttttttttttttttttttttttttttagttgtatttgttggaatggaaaatattttttaaatgagataaatatatgaaagtgaaaatgtttaaattttaaaggatttatattatatatatagttatttttttttaatgataagataggttttgagaaatgtgtttttaggtgatttggttttacgtgaatattataaagtgtttatatataaagttagatgatatagtttattgtatatttacgttatattataaagtttattgtttttaggttataaatttggatagtatattattatattgagtattgtaggtaattgtaatataatggtaggtatttgtggatttaaatatatgtaaatagaaaaagtatagtaaaaatatggtaaaaagatttttataatggtatatttatataggttatttattatgaatggagtttataggattggaagttgttttgggtgagttagtaagtgagtggtgagtgaattgaaggtttaggttattattgtgtattattgtagattttataaatgttgtatatttaggttataataaattgattttaaaaataattttttttttttaataataaattaattttagtttaatgtaatttttttaattttataaattttaatttttaaaattttttagtttttgtaatagtatttagtttaaaagattaatatgttataaagttgtataaaaatattgttttttatatttttattttagaaatttatttttatttaattttttttttatttttaaattttttttgttaaaaaaaaagatataaattagtttaggttgatatagggttaggattaataatattattatttttagtttttatattttgttttattggaagatttttaggtgtaataatatgtatggagttgttattttttatgataataatgtttttttttggaatattttttaaaggatttggtcgaggttgttttaagtttttttaataattagaaggagtatattttaaaataataataaaaagtatagtaaatatgtaaattagtaatatagttatttattattattattaaggattatgtattgtatataattgtatgtgttagatttttataggattgatagtgtagtaggtttgtttatattagtattattataaatatattattaatgtattgtattatgatgtatagtgttatttataatgttattatagagaagaaatttttaaaatttgtatttttaagttgtatatgttttaggtgatattttaagaagtttattagagaatagttgtttggagattgtatgttaagtagaaatgttaaaggttttagagtatgaggagatgttggaattttagtttagttaaatttgggttgagttaatagggtggtgaagtattatgagtgaggatttttgttttggagtaaggatcgtattgaattagatttatgttaataaaggttaaaattaagtttaagtagaattaaagtgggtttgatttttatgataattaatgaatcgttaagtagttagtagttttagtaggaagatagtaaaatttagaatttttgtaatatattatttagaatatgtggtatgttaagtagtagaaaaaatgtaataagtggagataaaataattaatagaagtcgatttagatgatttggatattgaagttagcgagtaaggatattttttaatatatttatgattaatatgttaaggataatagaggaaattatgggtaaattattttataatttttagaaagattaattatataaagagagaaaatacgaatgaatattgtgagaagggataatttataaaattatagattttattaaaatgaaaataagagaatattagatataattttatgataatattttttaaaatttaggtgtaatgaaatgagtttttgaaaaatatagttgaataaagttaatagaaaattaagtagaaaatataaatagttttttatttattaagaaattgaattttaattaaatttttttttattagaaaaattttttattatatttttttttattaatttttttaaaaatttaaaaaaggaatgttagttttatatagttattttttggtatttttttgggttgggttttaggatttttgtggatattaaaatttgtggattttttggttttatgtataaaatggtttattatatgtttattatttatgtatattattttatatattttaaattatttttagattatttataatatttagtgtaatgtatatgattgtaaatagtagttatattatattgtttaggaaataacgataagaaaatgtttgtatatttttagtatagatgtaattattgttagtaggtttaattatagagtatataatagtagtaatataatatttttaatttttaggtagttgaatttatagatgtggaatatatagatatggaggatagattgttttatattttatataatgaagagtggttaggcgcggtggtttatgtttgtaattttagtattttgggaggtcgagatgggtagattatttgaggttaggagtttaagattagtttggttaatatggtgaaattttatttttattaaaaatataaaaaaattagttgggcgtgatgataggtgtttgtaattttagttatttaagagattaaggtaggagaatcgtttgaatttgataattgttaggttttgagtaaagtagtttgatttttataatgtgattttttttaaataagatggaattttgtagtagatattttgggatttgaattgtaatattagttaattgatttataaagagttggttggtttgtgtatagtatttgtaagatgagtggataatattttgtttggaagtttatttttttgattaaagaagttaaaaataggatagtttttttttttttttttttggttgaattgtatgatgttttttgagaagtgatgaaagaattgaataatgataaaagtttttatgttttagtttttattgatttatgggtattgattgatggtttggttatataattaagagagtaatggaaaattggtttatgaaaagaatattcgtataggatatagttttgtggaaattattatggtaatttgaggggtgtattaatgtaaggcgtgttgatgtttgatataaattgggtgttgtttttatttaaattttatgttgagatataatttttagtgttggaggtgaggttttaagggaggtgattgtattatgggggtggttttttatgaatcgtttagtattatttttttagaatagtttaattagtttaatgttttttagaataatttttttttaggtttggaaggtgattgaaattaataagtatttatttttaagtgatttttaggtgtatttgtatttttagttataagaagaattgaggtagaaggattttttgagtttaggagttttagttttgtttgagtaatttttgagtttagggaaaaatattaatattatattttaaaaaaatttacgtttgtttgtggtgattatttgggttcgtgaaataagtagatattgagggttgtagtaatgtagagataggttgaattaagatatattttttttatattttttaatttataggtacgaaatatttataaggattgttttgtttaagaagagatagagatagtatatggttatgtagtaaatttttttatgggaaggttttgaaaatagatagttggtaaattagattgatattagtatttttaggaggtagtaaatgggttttggtaggaatagatattgattttggagtaagtattgtttagttggtggtagatgtgttattaaattgaattggggtttatttatttggtgtaataaaggtaaatatttatattgagattttgtagtgggagaaaggaaggcgtttatttgtaaggtattaagtaaggagaatcgggtagtttatatttaagatttaatttttttaatggtttataagtaagagtttttaaggtaggagtaaattttagtaaagtcgagttgtaggtaatattaaaaattaatgtatagaaattatatattggtttggtttaaaaaggtgggatattttgatgagggatcgtataggttataggtggattgaaagattttttgatttgtgattggataaggagttaaagttttgtttatatatttaggggtagtagggaggaatgtttaggtttgttttgtggatttgattttttttaggttttttaggaaaaaatttagaataaagagttatagttagtattgagtttttattttttttttatttgaggtttttttattagtggttttgtttggtgagagtttgggtttttgaaaaattatttaaggatatatgttaagatgttttttttagtttttatagagaattaaatattttgggattttaatttttttggttattgtttaagttatttttatttgtttgtttataaggttatttatttgttttttagggttggttaggtgtttggaattttttttgaaggaatttaatatttttttttatttttatgttagggaggtttagtaggtttttaagataaattcgtattttattttagatgtaaatgtttagagtattataatagaatttggacgggagatattgtaattatttgtattattgagttatatttttttatattaggaaatatatttgtttaaaatgtttaataatgtttagaaaaatattttgtttagaggaatagttttatagagaataaaaatagttaaatgatatattatttgtataaagtaggagtggggagatataagtatgaagggcgggtttatatacgtttatgagtgggtttatattagatatgagtgtggaaaaaggagtgtttttattagagagtattttttttttttttgttggattagggaaaggtgttagtatgatttgatatacgattttttttatgataagaggatattggaatgatgattagattttattttaattcgttttttttatatttgatttagtggttttaggataagggatgtatataaaagtgttaaaataggaattatttttaagtaagaaagtgtaaatatattttaaaattattatgtaagaattttttagggtttggaggagtaggttgtgtttttattgtatttggtaaagttggggttaatattgaatgtagttatattgtttggggttagatagttaattagttttttatttgtataattttattttttatgaattggaatggattaacgagagatatttgttagaatagtattgttttttttagtttaggttagtatagtagtagaatttaatgttttttttaaaattgttaatgtttggtataaatgaagtagaaggaggaatagtagttgagggtaaatgaatgaataaatgggttgtgtaatgaggaaaatttaatgttatatgaatttttaaaaaaaagaggtataagtaagagatgatattgttttttgataatgatggtgtatttcgtttttatggggatagagggtcgtgtgtttagagtgtttttagatgtcgttttttgtattttatttgtttgtttatttttattttttataattgttattgtttgaatgtttttttagaaaagcgtttgttggaaatttaatttttagtgtaataatgttaagagatgggatttttgagaggtgattggattattagagttttgtttttattaatgaattgattaaggttgtttttattaatgttgattataaaggatttgagtttgtgagttcgattttttattttttttagtttttatttttttttgcgttttttttttttgttagatatatttttttgattttggaatttttattttcgataattatgagttaattaaatttgtgtttattgtaagttatttagttttaggtgttttgttatagtggtataatttaaattaggggtttttaatttttttgtagtggatcggtataggtttgtggtttgttgggaattagatcgtatagtaggaggtgaagggtgggcgagaaagtatgagtatgatcgtttgagtttcgtttttggttagattagtggtggtattagatttttatgggagtacgaattttattgtaaattgtgtatgcgagggatttaggttgtacgtttttttataagattttagtgtttgattatttgaggtggaatagttttatttcgaaatttattttcgtttatttgtgtcgtttgttttggttagtggaaaagttttattttatgaaattagtatttggtgttaaatatgttgaggtaagttatgattatcgttgatttaagttatgataataataaattgtaatattgagtgtgaaagaaagataaaattttgggattttaaatttatagtgttaaagggaaaagttaagtttgggaattgagttatggaaaaattgttttttttttgtttttaaataaatatttgtaaagatagaggattatatatttttttaagtggttttttttataatttgtttataatgtaattttttgtgggttttaatatttttattttaaaatagagttttgttgattttttttttgataatgtaaagtaatagtttatttttataggtataggataaagataagattagaaattatttttttatttattcggagataaatatatattttattattttatgtttattttagtttatgtaaaatttagatttattgagtataagatgaatgtatagttgattgtttttttttttttgtttgtttttttttttgtaagtattgaagtttttaaaatttttttaggaaaaagcgtgggttatagatgttagtgatttttgtttttttttttaaggtgtattttggaatgggagattggagggatttatggattttaattttggatttggtttttttagtataatttatgagttagttgaatttgaatgcgaagatggaacgacgattgattagagttatgttgatattaatttttataatatggggattgattaagaaaattatataggaagttgagaaattgttggagtgttagggtgttattttttgttggaatttagaagtataatcgatgtttaacggattagtgttttttgatttagtttttttttattttgaatataagagattttaatagttaggtaggaatattatcgtttttattttgtatgaagaagttgtagaagatagatttttatttttttgtaatttttaggattaagcgtttttttgtaaaaagggaagggggagatatgtaagaagtatttaaattatagtaattttattttgaataagggttaagaaaaatgaagttggattattaatcggtaattaagagttgtatagtttgtaattattttgtttaattaattttaaaataaaaaggagtagatgttggaggtcgtacgaatgttttttatgatttgttataattgaagtttgttagtaataatatgaatttgtgattaattaagtagttgattaattattatttttttttttttgtttttattatttagtaaatatgaagggttaagaagttcgggcggcggtttttgtttattagaagtagggagttttttttttttcgttttttttttttttttttatgttagtttttttttaaaatgatgtagggtatttggtagataaaatttttaagtagtaaagtatttaaagagtgatttgggtgtttttaaaagtattttatttttaaagggaaatagagtataaaagtttagaaaatttatagtttgataatgtagtagaaaagaaaaatttattttttgaggagaaatttaagttggttgtagaaatttgtataagtaataataagttaagtgttgatttttaagataagggggaaaatgtttttagggtatgttataggtttttatggtagttttttttattatagatttagaagtataggaggaaaaaatggttttatgggtagggtttagggtttttatgttatgtatagtttagggatttggtgttttgtattttagatgtttttattgttgttaaaaggggttaaggtatagtttggtttatggttttagagggtgtaagttttaagttttgatagtttttatgtggttttgagtttgtaggtgtatagaagttaagaatggaggtttgggaatttttatttagattttagaagatgtatggaaatgttaggatgtttaggtaaaagtttgttgtaggggtagggtttttatggagaatttttgttagggtaatgtggaagggaaacgtggggttggagtttttatatagagtttttattggggtattgtttagtggagttgtaagaagagggttatcgtgttttagattttaaaatggtagatttattaatagtttgtattgtgtatttggaaaagttatagatatttagcgttagattgtgaaagtagttaggagggaatatatattttgtaaagttataggggtagagttgtttaagatatggggatttattttttgtattagtatgatttggatgtgagatatggagttaaaggaaattattttggggttttagaatttgattgttttattggatttaggatttgtatgggttttgtaatttttttgttttggttaattttttttatttggaatggttgtatttatttaatatttgtatttttattgtatttcgtaagtaattagtttggttttgattttataggttaataggtgggagggatttgttttgttttagatgagattttggattgtggatttttgggttaatgttgaaatgaggaaagattttgggggattgttgggaaggtatgattggttttgaaatgtgaggatatgagatttggaggggttaggggtggaatgatatggtttggttttgtgtttttatttaaattttattttgaattatatttttataatttttatatgttgtaggagggatttagtgggagataatatgaattatggaggtagttttttttatattgtttttgtggtattgaataaggtttataagatttgacgattttattaggggttttcgtttttgtattttatttatttttttttgttattgttacgtaaaaaaaaatttattttttgttatgattttgagattatcgagttatgtggaattgtaagtttaattaaatttttttttttttttagttttgagtatgtgtttattagtagtgtgaaaacggattaatatagttggtttcgtagattgaattgaaaaaaattgtttattttaatttttaaaaggtatgtgtaaaattgatgtaatttttaaattatatgtttgatataatttattagtgaagttttttggatttagatttttttatattagaaggattttgattataaatttaatttttataattaatatatggttgattatattttttatttttttttaggttagtttttataagtttttttttttaaggaaattgtttattttatttgtttgttaaatttattgatatgagattattaatatttttttttgagatttagagtgtgtattgatgtttttttttttattgttgattttgttaatgtgtatgtttttgttttgattagtttggttagaaatttataaggtgtacgatttttttttatagaattaatatttggatttattaattttttttttttgttttagttttttattttattattatttttttttttttgtatgtattggtttaatttgtttttttttgttttttataggagaaattaatttattaatttgagatttatttttttttttaatataggtatttaaggatattagttttttttttagtattgtttgttgggaataaatgtttagtgttgtaaagaaagattagtattgagataaaggattttttagtaaggtaattgatttttgtagaaagggtgttatttatgatggaacgatggtaagtgtatatttgaataaaggagagtaggggttttttataattttttaatgtagtttgtttttgtaattgtgttttgtttttattggttggagttggattgtataatttaagttgaatttggttggttaatttgaaaagtgtaggaatgtggttatattaatagagagtgtagttttggcgggaggagttgttgtaataggagggttaatttatagagtgggtagtagatgtgggatgtggtttttatagataaggattggcgggaaatttgtttattagggtaggggatatagagcgtaaggaagtttggttttgaaagtagggaataaagagttaggatgttgagtaagttaatttttaaagaggaattttttttatatttaatattattttaattgtattttatatatttgatatgttgtgttttagtattttttagaaaatagaagattttttaattttttttgtgattttttttttgaataagttgttatttagaattttgatgtttaatttttaatttttggtatttttatgatcgttcgttttagttaatttgggtagttataaaagaattttatagtttatgtggtttgtatataatagaaatttattttttatagtttcggaggttgggaagttaaagattaaggtttgggaaaagttagtgtatggtgagggttgttttttgatttatggatgttgtttttttttggtgtttttacgtggtggaaggagtaagtaatttggggttttttttataagggtatttattttattaatgagggttttgtttttattgtatgattattttttaatggtataatttttaaatattattatattagagattaggttttaattatgagtttaaggatgataaaagtatttagttttataagattattttattgttatagatttttaatgtatttttattatggttagaaaatatattttgtatgattttaatgtttttaaatttattgttttatggtttgaaatatggttttttttggtaaatgtattatttatattttagataatttgtgttttttattgatgtgtatatgtatataaataaattaagtttgggtgtttgataatgttttttaattttttatgtttttgttaaattttttttagtttttgtatttatagttgaaagaaagttttaaaatgtttaattatgtttgtagaattttttatttttttttgtaattttgttaatttttttttatgaattttgaagatttgttattggatttatttttggttgtatgtttttttgttgattttatttttttgttattatgaagcgtttttttttttttttggtaatatatattatttgaaaattttttattggtagtaaaataattattttaattttttgtgtttaatgtttgtatggtattgttttttttattaatttttatttatttgtgtttttatattgaaattgtatgttttgtatgtagatgtatgtttattgtagtatttgttataatagaaaagatatggaattaatttaaatgtttattaatggtgaattggataaagaaaatgtggtatatatgtattatggaatattatgtagttataaaaaagaacgagattatgtattttgtaggaatatggatggagttagaggttattattttttgttaattaatgtagaaaaagaaaattaattgttatatgtttttatttgtgagtgggagttaaatgatgagaatatatggatatatagaagggaataatatatatcggggtttatttgaaggtaacgggtggaaggagggagaggattaagaaaaataatgaatgggtgttaggtttaatatttgggtgggtattaataggtatagaaattatatgattgtgggtagtaagttatttaggtgtcgaggtaagagattgaaggtataagtttttttagtataataaagaaaatatttaaaataaaaatagttgtattagatataaaatatagatatggttatgtataaatattattaattattagtttatgatattattttttattttaatattataataatttttgttttataattataatttagaaaaaattaggttatatagagataggagttgaagggatacggtgagaagtgaatagaagataagagtgtgagttttttgttatgtttggatagggttattagagggttttttggtttggcggtaacgttagtgtttgagaaggtatttattatttagtagatcgggaaagggagtttttttttgttcgggggagttagagaagtttttgttttattattttttgtggaaggttcgatattagttaagttcgtttatagttatttggaggtttaaacgtttttttgtgatgttgtgttttagtggttacgtttttgtttgatttttatgttttattttttatatttggtttagttttttaaatagtagtagtaaaaattagtgaaagtattaaagtttttgaaatatatagaagaaataatgatataaattgtttttttttttttttcgtttcggttatcgaatagggaagggttttttgtttggtggatacgtgatttacgtgattttatttattattggagatggtttatattttttattttgtttttttgttttgtatttaataaataatagcgtagtttggtattcgaggttattattagttttcgtgttttggtggtagtggttttttgggtttaattttttttttttttttttgttttgtgtttttatttttatatttttttatttttatatataaagagaaaaatttataggttttgtagggttggagtttatatatgataaatttttatgatataaatttatttatataaaaatttgtatatgtattttgaattaaaaataaaagttaaattaaaaaaaataaagtttatgttttgaaaagagtatatggttgggttattttttttaatttagttatagaatttttgtttttaattggagtgttgatttatgtaggtttttgttattattgatatgataggttttaggtttgttatgttatttgtttagtttttttttttttgtttttttttttttgattaatgattttttattagaaattagagaaataaaataaattagaataatatttttaaagttttggaagaaataaaaggttaattaagaattttatatttagtatagatgttttttaagataaatgtaaaataaggagatattttaggtaaaagataattaagagaatttgttattagtagatttgtacgataaaaattggtaaagaaagtgttttaggttaaaagtaaatgatattaggtggaaaatgagattattagaaaagatgaagaatgtgagaagtggtaaatattaagtgcgaaaggttattttgtttttttatttttatttaattttattttatatatatagaattgtttaaaggtaaaataagatagttttttgatggggtttataatttatgtaaatatattatatataatatttatggtataaaagatggacgttttatagaggataaatggttgtaagatttttatatttatgtgaattagtatattattaattgaaagtgggttgtgaaatgttaagaatgagttaagttttgaaggaaattaagatataaaaaaatttaatagattaataaatttaggagatgatttttgaaaaagttaataggatagataggttgatagttagattaataaggaagaaaagagaggcgattttaataagtataattagaaatgataaaatagatgttattattgattttgtagaagtaaaaataattattaaaagttattatgaatatttgtatgtatataaattagaaaatttataagagatcgataaatttttggaaatatatatttttttaggaagaaattgattttttgaaaggattaataatgagttttaaaattaaatttgtaataaatagtttattaattaaaaaaagttttgaatttgatggatttatagttgaattttattagatggacgaagaagagttggtattatttttattgaaattattttaaaaaattgtaaaggaggaatttttttttaatttattttatgaggttagtattattttgatattaaaatttggtagagataaaataaaaaaagaaaattttaggttaatatgtttgatgaatattgatgtaataatttttaataaggtatttgtaaattaaatttagtagtttattaaaaagttaattttaatgattaagtaggttttatatttaggatgtaagattggtttaatacgtgtaaattaataaatgtgatttattatatatatagaattaaagatagaaattatatgattattttaatagatttagaaaaattttttgataaaatttaatatttttttatgttaaaaacgtttaataaattaggtattgtaggaatatattttaaaataataagagttatttatgataaataaatagttaatattatattaaatgggggaagtattttttttgaaatttagtataagataaagatgtttttttttattatttttatttaatagagtattggaagttttggttatagtaataaggtaagagaaagaaataagggtataggggaagttagattatttttgtttgtagattattattagtgaatgtttttttaaggtttataggtttttatattagtttgtggtgagtgttgttaattagtttttaatggattaaaatgtataatgtgttttatttgtgtattagtatgtttttatattgttggtaaagatatatttgagattgggtaatttataaaagaaagaggtttaacggatttaatggttttatatggttggggaggttttataattacggtggaaggtaaggaggagtaagttatattttgtgtggatggtagtaggtaagaagagagagttcgtgtaggaaaatttttatttttttaaaattattagattttatgagatttattcgttattataagaatagtgtaggaaagatttatttaaaaatttaattattttttattaggttttttttatgataggtgggaattgtgggagttataattgaagatgtgatttgggtggggatatagttaaattatattaatttgtaaattattataaaattgttaatatttagttatttttgtttttttaggaaggtcggggtagtagatttgtgtgttaaatatttatgtgaagttatttttaggaagaagttttatttgtggtttttttttttttaggttttatagtttttattataattttacggtgttgttttaggatggatttgtatagttagggtttttcgttgagggatatttggatggttagtcgtttttgttttatgatagatagaaaggtagggtaggggttttgtggatagttggtagaagtagttttgggagttgagatttgggatatagagatcgaggatttgatagagaatgggtaggattttaggaggattttgatttatattaagggttagaaaggaggtgagagtcggtaggggtaagagtaatggtagaggttttttttaggagagttggaggtagagagtagggatttgtttttttttattggatttggttgagggtgggttgagaaataggggttagtggggtttagtagggaggtgagtcggtatttagtttatatagggaggtatggaggagggttagggaggggttttagttgggttgagttttttatttgggtgggaaggtgaggggtttaggaatgaattgttgggtgggggtaggtttgtattttttttaggagattagggtttgtgagatttatgaagatagtagtattagaggttttcggtatttttattatgatggggagtttttttttttttaaaatttggagatttaggaatggatagtgttttagttttttagagtttagattttagttatgaatattagaaatttttgggatgaagatgttatataggttaagatatttttattttgtgatggtagatcgtttgtagaaattatagtaatatttcgaattttaggagggtattaggagaataggtatcgattttgggtaggggttttttttttttttattttattagagttatttttttgttagttttgttttgggaaattttttttgtgttatggatgtaggcgttttttgttggcgtattgtgttttgattttttttttttgttagagttattggataaagatagtgggttggggattgaattatttagtgttgtaatttgggaaagtaatggtttatttttaatagaatttttattttggggtgggtgttaggtaggagaggaagtttttagggttagggttgttttttttgttttttagtttgtttattttagagagtttttttttggttttatgatttaggagtttaattttgatattttttttttttagtattaatgtggggattttagagtttgaggttatagtttgaggtttatttttttgttagtttaaaggaattgggttttagggtaaggatagatttgtaaaagattcggggtttatgagggttttagttagagtgagaatattggagaggagtagttttgttttttgagttttttttagagggagcggggtttggttatgtgttttattggttttgtttttttttatttagtgtttattatggtgaatgttaggttttagagaataaagttatttttatatgttgggtttttggtttttatttttagaatatttttttggtttggtgttaggttggggtattttttgagttaggatgtttatcggtttgtgggtgttttgtttaatgggaatgggatttattagatttgggtggttattaagattttttaagaagaggagtagagggttatttgttatgtgggatatagtaggaattatagtatttattttggtgttttttggtgagtttggggcgatttttaagtgttttgatttagaaagggttaggttaaggtgggtatagtagagataattggaattttgagtgtttagtgtgtaataaggtttttttttttagggaaagttttgatgttttagagtttatggtaatcgtttcgtatgttgcggttgttgttgtttttgttattattattattattttttgtgttttttggtgtaagaagaaaatattagttgtagaggatttaggtgaaaaaagggggtagtggttggagatgggagggattttgtttgggtagtagggtttttttatagtttttgtatagataggtatgtaggtgataaggttttggaatagggtttggaagttggggtatttgggaggggaataggagttataattttatttagatttttaagttttgtttaagttagggtcgggttaaagttttcgaatgtttatttgtggtttttttttgttgtaggtgaggagtgggtagtaaggacggtcgtggtatttgttttgtttttatttttatttttttgttttttaggtttattagcgtgtattagcgtggggtgagttgggaattatgtgttgattgttgagggtttggatgatgatggttttagagggggtaaatagtaaagacggttgtgatttggggagggttagaaattggagaggaatatgaggagaggtggtgtttttagtttttttttttttgtattttttttttttgtttttttagttattaggaggatattaagaaaaagatttatgaggtttagattggggggtttgtttgtgtagttttttggagatttttttgtaatagggagggttttgagtgtatatagttatttttgtttattttgtagttttttacgcgttttttttaggagttgtttcgggggtgtcgtgttttttggattattcgaggttatgttttttttaggtttttattatatggttttgtattttgagtttttttgtagataatatggatgagaagatacgtagatgtttttgggttatttggggagtggtgattagttttttgttagggtagttgttatttttgtttttattttatttttaggtgtttttttgtttaggttttgaaggatatagttttttagggatatagtgtttagggattatgttttttgggttttgttttgtgttttgtggttttattttgttttttttgagttttttttaaggtggttatttttttgtaaatttggagtaaaggatggttaggatgattttttttatagttagttgtttgaggggaaagtaaaagagaaaataggaagttttgtgtttttgtaaagatagaggtagtgtaggggattagtgagaggttgggtgtttaggaaattggagtttttttgttatttttttatttttttgtatttggtggtgggggtgggggttttttatttttgaatttaattgtattgtttgttggttttttagttttgggtagatgggaaggtttattttttgttttgtagtaagagggtttcgtttaggaggtatttatagtaggggtagtgtaggtttgtggtcgtttttgtttttatttgtattgttttttatagaggggttgttatttttgggttttcgtgggtaggaaagtttgttttgtaggttacggggtattggttagggaaagggtgtgaaagttatgtgttaattttttaaaaatttttttttaaatattgatgtttaataaagatgtttataattttcgttggataattttaataggattttttttaatattgatgttgtaaagtatgtataattaaatgagaagttaagtttggagttttttttttaggagggtttatgttggagatggtggttgtggtagtggtaattttggagtgtagagggtgggtggaggtagttttaggttgaggggtttttagaaattttttgttttatagggagaagaagaagattttttgtgggttgtgagggtagtggtttgggtggaagttttgttaggaatagggtaggaaggttttgtagttttagtaagtagtagttttggggtggaggtgtatttttaggggtgagtggattaggtaggagtaaggatggtttaagtgtaggttacggattcgggtgggtgttgagggtttggaaaggttgggtgtttttaagcgtggagggttttaggatttagttaggtgtagattcggtggtagttacgtgtttttgtgtcgagtttttaggttttttgatgggttttgtagttaggggttggttgtttagggttcggagggtggaacgttgagttgtaggtggagcggggagtttagtgtgtagggtttgttttgttgtgtaagtgtttttgtaggtgaggagggtttggggattgagagggagaaggatcgcgtgcgtgatttagtttaggtttggtaggatacggagttaggattattttttttttggggaggttttttattgtgtttaggttggtggggtttgggaggaggggagggtttcgggtttttttttggatttgatttttgttttttagttatgaggtttttttattttttatatggtggatggtgggtatagggtaggtattattgttgagggaattataggaggagattggtggaggttggagaaattaggatgggagggaggaaaaagtgggggcgttagttttttttttagagaaagggtgaatttgatttcggagtttttgaggagggagaaatttttagggaatgaaaagtagtattttgtatttagtggagtatttattgttttttttttttttttagagtatatgagtttataaagtttagattaatatttggttgggataggagattattagggtattatatagttggaattttagtttttggtgttagtttttgggtttgttggttttattggatttaattttttatttaggttttattagtatttttttttttgatgttttagtttttttatatattaaatgggaaattaatagtatttattttttgtggttagggattgataattgttagttgttatgaggtgtttgtagttgtgttataatattcggtattattatttttgttgttttgttattattttattaatttttattattttttaatgtattgtatgtgtagtaattatatgtattaaagtatatatgtgtttttaaatatattgtaatgtgtataaaagttttatgagtgtgtgttttgttgacggttttttttggtaagtttgggattagtttttttggtattttgaggtttttttatttttggtatattgttataaattattttatgtttattatgtttgtataattttatattgtggatttttattttttaaatagatatttttggtttgtgttttattttatgtatttgggaagagtagaatataaggtttaggggaaaaggagaggtttgttttaatgttttgatatagtatgaagaaatttttttttttttttatttttttttgttagtttttagtgattgatagatttatagtaaaatagaaaaggaaaggttgggggtgggggtgtatatttggggttaaaatttaggggttgattttgggggaatatttgttttgaagagttggattttttatgtgatgatgttgagttgaagtgtaatattagagatgggggtagagagggttttgagtttttttggtattgaagaataggagttatattgtttttggggtgaagcgattgttgggaatatgtgaattaaattgatgaagaataagtgaatggggaatgtgggtgagtaaagtaagtattagtagttagtttttgttattagtttaggttgatcggggtagggaggtggggagatggatattttttattttgttgtttaattttttttgattgttgggtgtattaaaattttagaaattattattaaagaattaatttaggtaattaaatattatttatttttaaaaattttgaaataaaaaataattttttaaaaaagtggtcgggtacggtggtttacgtttgtaattttagtatttcgggaggttaaggcgggtagattatgaggttaggagtttaagattagtttgattaatatggtgaaattttatttttattaaaacgataaaaattagttgggtatggtggtatatgtttgtaattttagttatttaggaggttgaggtaggcgatttttttgaatttgggaggcggagtttttagtgagtcgagatcgtattattgtagtttagtttgggtgataaagtaagtttttattttaaaaaaaaaaaaaaaaaaaaggaatgatattggatatttttattttgtttttaatatagaggagtagtttttaatattttttttattaattttgattttagatagaggtattttttttttataaataattttattagtttaaggaagtttttttttatttttggtttattgagtttttataatgaatagttgttgaattttattaaatgatttttatgtatttgttgatataattgtatgtttttttatttttttttatttatgtggtaaattattttgattttttaaagttatattttttttataaattttatttagttttattgtatattattttttttatatattatttgtttttattttttaatattttagatggaattttggtggttgtgtttattagtttatttagatggtggatattttttttgtaatgttattgttatgtttaagtttttttttgggttatgttgttttataaaattagttggaaggtgtttattttttttttattatttaaaagaatatatgatagtttgttttttatgtttgtgtgttttatatttgtgaatttaattatttgaggatcgaaattgttgttgttgttgatgtatattatgtagttaggtttatttatagcggttatatttgtattgaagatatatagatttttttttattattattttttaaataatatagtataataattatttgcgaataatttatattgaattaggtattagtaatttataggtgatttaaagtatatgggaggatgtgtataggtaataagtaaatattagattattttatatatgggatttgagtatttatagattttggtatttatagggggttttagattttattttaaaaggatattaagagatgattgaataagattgatttttttaaaaaaagttttggaagaattgataggggaaaaaacgtgggtaaagagtgtttttggtgggaaagaatttaattagaattttattttttaatggatataggattatttatattttttatttagttttttgttggtttgtttaattgtcgtttttaagaatttattttattgtatttaaattttaaaaggtattgttaggaagttgtgtttaatatttttttatttttattttaataaaatatacggttttatgttgttttttatagtgtttatttttgttttttttttttttatgattgatttttttggggattttgaaatagtttgtttatttttttttttattttttttaatatattaattataaatattttgagaatgtttttgtttgtttgttttaatatttatattaatttttagtttgattttttttattatattttaagttttagcgtatatgtgtataatatgtaagttagttatatatgtatgtatgtgttatgttggtgtgttgtatttattaattcgttatttaatattaggtatattttttaatgttatttttttttattttttttattttataatagttttcggtgtgtgatgtttttttttttgtgtttacgtgtttttattgtttaatttttatttatgagtgagaatacgaggtgtttggttttttttttttgcgatagtttgttgagaatgatggtttttagttttatttatgtttttataaaggatatgaatttattattttttatggttgtatagtatgatagattggattaagaaaatgtggtatatatatattatggaatttttagtttgattttatttttatttgttgtattttttttgttgtttggtatgttatatattttggatgatgtgttatagaggttttggattttgttatttttttttatagattgttaataatttgatagtttattaattataaaagaattatttttggtaaaaatcggatttattttgattttgtttaggtttgattttattttattttattttattttatttatttttttgttatattttaagttttagggtatatgtgtataatgtgtaggttagttatataggtatatatgtgttatgttggtgtgttgtatttattaattcgttatttagtattaggtatattttttaatgttattttttttttttttttttattttataataatttttagagtgtgatgttttattttttgtgtttatgtgtttttattgtttaatttttatttatgagtgagaatatgcggtgtttggttttttgtttttgcgttagtttattgagaatgatgatttttaattttatttatgtttttataaaggatatgaatttattattttttatggttgtatagtattttatggtgtatatgtgttatatttttttaatttagtttattattgttgggtatttgggttggttttaagattttgttattgtgaatagtgttgtaataaatatacgtgtatatgtgtttatatagtagtatgatttatagttttttgggtatatatttagtaatgggatggttgggttaaatggtatttttagttttagatttttgaggaattgttatattgatttttataatggttgaattagtttatagttttattaatagtataaaagtgtttttatttttttatattttttttagtatttgttgttttttgattttttaatgattgttattttaattggtgtgagatgatattttatagtggttttgatttgtatttttttgatggttagtaatggtgagtatttttttatgtgttttttggttgtataaatgtttttttttgagaaatgtttgtttatgtttttcgtttattttttgatggggtggtttttttttttttgtaaatttgtttaagttttttgtagattttggatattagttttttgttagatgagtaggttgtgaaaatttttttttatgttgtaggttgtttgtttattttgatggtagttttttttgttgtgtagaagttttttagtttaattagattttatttgttaattttggtttttgttgttattgtttttggtgttttagatatgaagtttttgtttatgtttatgttttgaatgtaatgtttaggtttttttttagggtttttatggttttaggtttaacgtttaagtttttaatttattttgaattgatttttgtataaggtgtaaggaaaggatttagttttagttttttatatatggttagttagtttttttagtattatttattaaatagggaatttttttttaaggtttgattttagattttgttattttgttattttagtgtggtatttattttaaggttacggtttttatttatagtgttttattatttttatgttttaattcgggtttggttgggttaaattaattttaatatttttttatattatgaagtttttggtatttttatatagtatgtaatttttaagtagttgttttttggtgggttttttatagtattatttggagtatatgtagttttggagtgtagattttgggagttttttcgttgtagtttttttttttagtattttatttttaaattttagttaaagtgttaagtttgaattttgatttttgatttttttgttattgagattgattttttttgtttgggttttatttttttttattgaattttgaaaaaaatttttttagaaagaaagttgatgaggatgtgagttttttttttagggattttattttttggagggtgatagttttgttttggttgttgttttgtagttgtataattgtatcgtgttttgtttggtttttatatttgtttatagtgggaggatgagttttaaatgagttagtttattatagtttaagttagaagatttttaattttttaatagttattgtatttgaaaatttgaatagggtaatttgataatttataggtaaagttaatatgttatattttagtgtttagttgaaattttaattttatttttaataattttatatatataaaatatatatatatatatatatattattgtgttatatagttatgtattgtttaatgatgtttttgttaatgattgattacgtatacgattgttattttattaaacggagttgaaaaatttttattatttagtgatattgtagttattgtaatgttataatataatgtattaattatgtgtttgtggtgatgttgatgtaaataaatttattgtattgttaattttataaaagtttattttatatagttaaaaatagtatgtaatatttgatgataataaatatgttattggtttatgtatttattatattttttatggtgattttagagtgtgttttaattattttttaagttaaattaaaatagcgttaggtaggttttttaggaggtattttagaagaaggtattgttattataggagatgatagttttatgtttgttattatttgtgaaataatagtgggataagatgtgaaggttgaagttggtgatattgttgattttgattttgtgttagtttaggttaatgtatgtttttgtttttattaaaaaagattaaaaggttaaaaaattaagtagaaatagtttttagaatgagaatataaggaaaaatatttttgtatagttgaataatgtgttggtgttttaagttaagtgttattataaaatagttgaattttttaaaaaattaaggtttataaatatgaaaaagtttaagatttgaatttagttttggattaagtggatttgatagatatttatagagttttttatttaaaaataatagaatatatattttttttattgttatatagtatttattttaaaattggttatataattaaaagtaaaatattttttagtaaatgtaaaaagaattgaaattataataaatagttttttagattatagtataattaaattagaaattaaaagtaagaaattcgtttaaaattatataattatatggaaattgaataatttgtttttgaatgattgttgggtaaattattaaattaaggtagaaattaataagttatttgaagttaatgagaatgaagagataatgtattagaatttttgggatatagttatagtagtgtaaagagggaaatttatagtattaaatgtttatattaaaatattagaaaaattttaagttaataatttagtattataattaaaagaattagagaaataaaaataaattttaaagttagtagaagataagaaataattaagatcggagttgaattgaaggagagagagatatataaaattttttaaaacgttaatgaatttaggagttgtttttttgaaagaattaataaaatagattattatttagattaatagagaagaagagagagaagaattaaataaataaattagaaataataagggtgatattattattggttttatagaaatataaataataattagagaatattacgaatatttttatgtaaataaattagaaaatttagaagaagttgataaatttttgtttatatatatttttttaagattgaattaggaagaaattgaaatttttagtaggttagtaatgagttttgaagttgaggtaataaatagtttattaattaaaaaaagtcgaggattagatagattgatagttgaattttattaaaagtataaaggagagttggtattatttttattaaaattattttaaataattgaaaaggggggatttttttttaatttattttaaaaggttagtattattttgatattaaaatttggtagagatataataaaaaaagaaaatttcgggttatgtatgatgaatattaatgtaataatttttaataaaattttggtaaatcgaatttagtagtatattaaaaagtttatttattataattaagttggttttatttttaggatgtaaggttggtttaatatatataaattaataaatgcgatttataatataaatagaattaaagaaaaaaattatatgattattttaatagatgtagaaaaggtatttgataaaatttaatatatttttatgttaaaaatttttaataaattaggtgttgaaggaagagattttaaaataataagggtaatatatgataaatttatagttaatattatattgaatgggtaaaagttggaaatattttttttgaaaatcggtattagataagttttttattatttatattagttttattattatgagaatagtagttttttaagttgataaggaattttagtaacgttttaggatatagaatgtgtaaaaatcgttagtatttttatatattaataataggtaagtagagagttaaattattaatttttatttataatttttatagaaagaatgaaatatttaggaatatagttaataagggaagtgaaggatttttttaaggagaattataaattattgtttaaagaaaaattagagaggatataaataaataggataatattttatgtttatggataggaagaatttatattatgaaaatggttatattgtttaaagtaatttgtagatttgatgttatttttattaaattattatagatattttttatagaattagaagaaaaaaaaatattatttttttttttaagatagagttttgttttgttatttaggttggagtgtagtggcgtgatttcggtttattgtaattttcgcgttttcgggtttaagcgatttttttgttttaattttttaagtagttgggattgtaaatgcgtattattacgtttagttaatttttgtatttttagtagagatggggttttataatgttggttaggttagttttgaatttttgattttatgatttgtttattttagttttttaaagtgttgggattataggcgtgggttattgcgtttagtttgaaaaaaaaaataaaattatttttaaatttatatggaattaaaaaaagagtttgaatagttaagataattttaagtaaaaagaataaaattggaggtattatattatttgattttaaattatattataaggttataatattaaaatagtatggtattgatataaaaatagatatatagattaatggaatagaataaagaattgtgaaataagattatatatttataattatttgatttttgataagtttgattaaaataagtaatggggaaagaattttttatttaataaatggtgttgggagaattggtttgttatatgtagaaaattgaaattaggttcgttttttaaattatatataaaaattaatttaagatggattaaagatttaaatgtaaaatttaaaattataaaaacgttagaagaaaatttatgtaatattttttagaatataggtatgggtaaagattttatgatgaagattttaaaagtaattgtaataaaagtaaaaattgattaatggaattaattaaattaaagagtttttgtatagtaaaggaaattattagtagagtgaatagataatttgtagaataggagaagatttttgtaatttatatatttgataaaggtttaatatttagagtttataaggagttttagtaaatttataagaaaaaaataaataattttattaaaaagtaggtaaaggatatgagtagatattttttaaaaaaagatatatatgtagttaataaatatatgagaaaagttgaatattattgataattagagaaatgtaaataaaaattataatgagatattagagtggttattaataagttaaaaaacgagatgttggtgaagttatagagaaaaagtaatgtttttatattgttggtggaaatgtaaattcgtttaattattgtggaagatagtgtggtgattttttaaaaatttagaggtagaaattgatttagtaattttattattggatatatatttaaaggaatataaattattttattataaagatatatatacgtatatgtttattgtagtattatttataatagtaaagatatggaattaatataaatgtttattaatgatagattggataaagaaaatgtggtatatatataatatggaatgcgatgtagttatataaaggaataagattatgttttttgtagggatatgaatggagtgggaagttattatttttagtaaattgatttaggaatagaaaataaaatattatgtgtttttatttataagtgggagttgaatgatgataatatatggatatatgggggagaataatatatattggggtttgttagagggtatggggttgtgggagggaagtattaggaagaatagttaatggatgttggttttaatatttaggtgatgggacgatttttgtagtaaattattatggtatatatttatttacgtaataaatttgtatattttgtatatgtatttttgaatttaaaaaaagggtggagaaaaaaagattaaaaagttatagtaagttaagattaatttattattaaagaaagaaaatgatttttaaaattaatttagtgtagtttaaatgtatagtgtttataaagtttaagtagtgtatagtaatgttttagattttatatttattcgttatttattgatatttagagtaatttttagttttgtaagttttatttatggtaagtgttttagataaatgtgttagtttttaaaaaattttttaattatatttttgtggtaaaattttgtgggaaaatttaaagttttttttttattgtttttatattttaataattattaatatagaaggtttttgcgatgaaacgtaggggatttttttttaaaaataagtaaataatcggttttgttatggacgttagttgggtattttttaatttaattttgatattatttttttggagataattttagatttcgtaagttgatggtttagtttttacgattgttatttttttatttttgatgataattttaagttttagattattttgtttgtgttgttaatttattgattataaattagggtttttaaaatttatttttaggtttgattgatttgttagaatggtttatagtatgttaggaaatatttatatatattaattagtttatttaaaaggatattttaaaggataaagagttatatgaagagataagagttatatgaagagatatatagggtgaggtttgaaagggttttgagtgtaggagtttttgttttatgtgtttgggaagtgttattttttttggtatatgtttgagttattgtttatttttttataagtttttttgtgtttagttatatagaagttttttgattttttttttttgggttttgatggaagttatattttttaggtatgatttattatattatggttattagtttaatttttagttttttttgtttttttgttaatggtataattttatgtttaaaaaaatttaaagatgttattaaaaaataattagatttaataaataaatttagtaaagtggtaagatgtaaaattaatatgtaaaaattaatataatgtttatatattagtaatgaagtagttaagaaagaaatttaaaagtagttttatttatgatagcgataaaaattttttagaaaaataggaataaatttaagtaaggaaatgaataatttttttataaaaatttatataatattggggagtagttttaagatggttaaataggaatagttttagtttatagtttttagcgtgagttatgtagaagatgggtgatttttgtatatttaattgaggtattagggttattttattggggtttgtcggatagtgggtgtagaatagtgggtgtagtgtatcgagtataagttgaagtagggtaaggtatcgttttatttaagaagtataaggggttaggaaatttttttttttagttaagtaaagttgtgatagacggtatttggaaaatcgggtagtttttattttaatattgcgtttttttaatggtttgagtaaatggtatattaggggattatattttgtatttggttcggagggttttaagtttatggagttttttttattgttagtatagtagtttgagattaaattgtaaggtggtagtaaggttgggggaggggcgtttattattgttgaggtttgagtaggtaaataaagcgattgggaagtttgaattgggtggaattaattgtagtttaaggaggtttgtttgtttttgtagattttatcgttggaggtagggtatagtcgaataaaaggtagtagaaatttttgtagatttaaatgtgtttgtttgatagttttgaagagggtagtggttttttcggtatggagtttgagatttgagaatgaatagattgtttttttaagtgggtttttgatttttgagaagtttaattgggaggtatttttttgtaggggtagattgatattttatacggttaggtatttttttgagataaaatttttataggaacgattaggtagtaatatttgttgtttagtaatatttattgttttgtagtttttgttgttgatatttaggtaaatagggtttggagtggatttttagtaaattttaatagatttgtagttgagggttttgattgttagaaggaaaattaataaatagaaagaatatttatattaaaattttatttgtacgttattattattaaagattaaaggtagataaaattataaagatggggaaaaaatagagtagaaaaattgaaaattttaaaatttagagtgtttttttttttttaaaggaatgtagttttttattagtaacggaataaagttagacggagaatgattttgatgagttgagagaagaagtttttagacgattaaatttttttaagttaaaggaggaagtttaaatttattgtaaagaagttaaaaattttgaaataagattagacgaatggttaattagaataattaatgtagagaagtttttaaaggatttgatggagttgaaaattatggtaggagaattacgtgatgcgtgtataagatttagtagtcgatttaattaattggaagaaagggtaatagagattgaagattaaatgaatgaaatgaagtaagaagagaagtttagagaaaaaagaataaaaagaaatgaataaagtttttaagaaatatgggattatgtgaaaagattaaatttatattggtttggtgtatttgaaagtgatagggagaatggaattaagttggaaaatattttgtaggatattatttaggagaatttttttaatttagtaaggtagattaatatttaaatttaggaaatgtagagaatgttataaagatatttcgtgagaagagtaattttaagatatattaattgttagatttattaaagttgaaatgaaggaaaaaatgttaagggtagttagagagaaaggttgggttatttataaagggaagtttattagattaatagcggattttttagtagaaattttataagttagaagagattgggggttaatatttaatatttttaaagaaaagaatttttaatttagaattttatatttagttaaattaagttttataagtgaaggagaaataaaatattttatagataagtaaatgtttagaaattttgttatttttaggtttgttttacgagagtttttgaaggaagtattaaatatggaaaggaataattggtattagttattgtaaaaatatgttaaattgtaaagattatcgatgttaggaagaaattgtattaattaataagtaaaataattagttaatattataatgataggattaaatttatatataataatattaattttaaatgtaaatgggttaaatgttttaattaaaagatatagattggtaaattggataaagagttaagatttattagtgtgttgtatttaggaaatttattttatgtgtagagatatatataggtttaaaataaagggatggaggaagatttattaagtaaatggaaaataaaaaaaggtaggggttgtaattttagtttttgataaaatagattttaaattaataaagattaaaagagataaagaaggttattatataatggtaaagggattaatttaataagaagagttaattattttaaatagatatgtatttaatataggagtatttagatttataaagtaagttttgagtgatttataaagagatttagatttttatataataataatgggagattttaatattttattgttaatattagatagattaacgagatagaaagttagtaaggatatttaggaattgaatttagttttgtattaagcggatttaatagatatttatagaattttttattttaaattaatagaatgtatattttttttagtattatatcgtatttattttaaaattgattatatagttggaagtaaagtattttttagtaaatataaaagaatagaaattataataaattgttgtttagattatagtgtaattaaattagaatttaggattaataaatttatttaaaatcgtttaattatatggaaattgaataatttgtttttgaatgattattgggtatataatgaaatgaaggtataaataaagatgttttttgaaattaatgagaataaagatatagtatattagaatttttgggatatatttaaagtaatgtgtagagggaaatttatagtattaaatgtttataagagaaagtaggaaagatttaaaattgatattttaatattacgattaaaagaattagagaagtaagagtaaattttatatttaaaagatagtagaaggtaagaaataagtaagattagagtagaatttaaggagatagagatataaaaaattttttaaaaaattaatgaatttaggaggtggttttttgaaaagattaataaaattgatagatcgttagtaagattaataaagaagaaaagagagaagaattaaatagatataataaaaaatgataaaggggatattattatcgattttatagatatatagattattattagagaatattataaatatttttacgtaaataaattagaaaatttagaagaaatggataaattttttaatatatatatttttttaagattaaattaggaagaagttgaatttttgaatagattaataataggttttgaaattgagttaataattaatagtttattaattaaaaaaagtttaggattagacggatttatagttaaattttattagaggtataaggaggagttggtattattttttttgaaattattttaattaatagaaaaaagggaattttttttaatttattttatgaggttagtattattttgatattaaagtttggtagagatataataataaaaaaaagaattttagattaatatttttgatgaatattaatgcgaaaatttttaataaaatattggtaaattgaatttagtagtatattaaaaagtttatttattgtaattaagttggttttgtttttgggatgtaaggttggtttaatatatgtaaattaataaatataatttattatataaattgaattaatgataaaaattatatgattattttaatagatgtagaaaaggtttttgataaaatttaatagttttttatgttaaaaatttttaatatattagatattgatgaaacgtattttaaaataataagagttatttatgataaatttatagttaatattatattgaatgggtaaaaattggaagtattttttttgaaaattggtataagatagggatgtcgtttttcgttatttttatttaatataatgttggaagttttggttagggtaattaggtaagagaaagaaataaagggtatttaattaggaaaagaggaagttaaattgtttttgtttgtagatgatatgattgtatatttagaaaattttattattttagtttaaaatttttttaagttgataagtaattttagtaaagttttaggatataaaattaatgtgtaagaattataagtatttttgtatattaataatagataaatagagagttaaattatgagtgaatttttatttacgattgttgtaaagagaataaaatatttaggaatttaatttataaaggatatgaaggatttttttaaggagaattataaattattgtttaataaaataaaagaggatataaataaatggaagaatattttatgtttatggataggaaaaattaatatcgtgaaaatggttatattgtttaaggtaatttatatttttaatgttatttttattaagttattaatgattttttttatagaattggaaaaagttattttaaagtttatatggaattaaaaaaaaagtttgtattgttaatataattttaagttaaaagaataaagttggaggtattacgttatttgattttaaattatattataaggttatagtaattataatagtatggtattggtattaaaatagagatatagattaatggaatagaatagaggttttagaaatgatattttatatttatagttatttgatttttgataaatttgataaaaataagaaatggggaaatgatttcgtatttaataaatggtgttgggaaaattggttagttatatgtagaaagttgaaataggattttttttttatattttatataaaaattaatttaagatggattaaagaattaaatgttagatttaaaattataaaaattttagaagaaaatttaggtaatattatttaggatataggtatgggtaagaattttatgattaaaatattaaaagtaacggtaataaaagttaaaatagataaatgggatttaattaaattaaagagtttttgtatagtaaaagaaattaatattagagtgaataagtaatttatagaatgggagaaaatttttgtaatttatttatttgataaagggttaatatttagaatttataaagaatttaaataaatttataagaaagaaataaataattttattaaaaagtgggttaaggatataaatagatattttttaaaagaagatatttatgtagttaatagatatatgaaaaaatgtttattattattggttattagagaaatgtaaattaaaattataatgagatagtatttatgttagttagaatggtgatattaaaaagttaggaaataatagatattggagagggtgtggagaaataggattatttttatattgttagtgggagtgtaaattagtttaattattgtataagttagtgtggtaattttttaaggatttagaattagaaatattatttgatttagtgattttattattgggtatatatttaaaggattataaattaggttattataaagatatatgtatatatatgtttattgtggtattatttataatagtaaagatttgatattaatttaaatgtttattaatgatagattggattaagaaaatgtggtatatatatattatggaatattaagtagttataaaaaaggatgagtttatgttttttgtagggatatggatgaagttggaaattattattttgaggaaattattataaggatagaaaattaaatattgtatgtttttatttataggtggaaattgaataatgagaatatttggatatagggcggcgaatattatatatcggggatagttatggagagggggttgggagagggatagtattaggagaaatatttaatgtaaatgacgagttaatgggtgtagtaaattaatatgtatatttatgtaataaatttgtatattgtgtatttgtattttagaatttaaagtataataaaaataaataaataaaattaaaaaggaaaaaatatatatgtagaatatatataatatatgtatttatttatttatagaaagagaaattgaaaaaattttgaaaataaatgataatggaaatgtaatatattaaaatttaagggatatagtgaaagtaatattaagagggaagtttatagttataagtagttatattaaaaaaaaaagaaaaattttaaataaataatataataatgtattttaaatagttagaaaagtaagggaaaattaaatttaaaattagtagaagaaaagaaatatgaagattagaataaaagtaaatgagtttgaaatgaagaaaataatattaaagattaatgaaataaaaagtaagttttttgaaaagttaaataaaattgataaattattagttagattaatagaaaaagatagaagatttaaataaataaaattaaatatgaaaaaaggatattataattgatattgtagaaatttaaaggattattagtggttattatgggtaattatatgttaataaattggaaaatttagaagaaatgggtagatttttagatatatataatttatttagattgaatggtgaataaaatttaaaatttgaatagattaatagtaagtaattagataaaagttataataaaaagttttttagtaaagaaaagttttgatggttttattgttgaattttattaaatatttaaagaaaaattaatattaattttgtttaaattgttttaaaaaatttaggaaggaatatttttaaaattattttataagggtagtattattttgatattaaaatcggataaagatatattaaaaaaaggaagttataggttaatattattgataaatattgttgtaaaaatttttaataaaatattagtaaataaaaatcgataatatattaaaaagattattttttatgattaagtgggatttattttagggatgtaaggatggtttaaaatatgtaagttaattaatgtgatatattatatttaatagaatgaaagataaaaattatataattattttaattgatgttgtaaaaatagttaataaaatttaatatttttttatgataaagattgttaaaaaattgagtatagaaggaatatattttaatataataaaagttattatgtataataaatttatagttagtattatattaaatgaatggggaaaaattgaaggttttttttttaagattagtaatataataaggttgtttgtttttattatcgttattgattatagtattggaaattttagttagagtaattagataagagaaagaaatagaagttaaattatttttgtttgtagatgatataattttatatttggaaaaatttataagattttattaaagaattattagaattgataaataaatttagtaaagttgtataatataaaattaatatataaaaattagtagtagttaggtatagtgttttatgtttataattttagtattttgggagatagaggagggtgtattatttgagtttggaagtttaagattagtttaggtaatttagggagattgtatttttattaaaaaaaaaaaaaaattgtaattagttgagtgtggtgatacgtgtttgtggttttaattatttggtaggttgaggttgtaggttgagattgtagtaagttgtagttatgttattgtattttagtttgggaaatatggtagattttgttttttaaaaaagaaaaattaataaggcgtgatagtgtatatttgtggttttagttgtttaggaagttgaggtaggaggattatttgagtttaagaagttaaagtagcggtgagttgtgtttatattattgtattttagattgggcgatagagtaagattttgttttagaaaaaagggaaattttggatatttttatatttgaggtttttttaatggttgttgttaatgattttggttataagggatgatgtatgaaggaaatatgggttttgaaataaaattggtttgaatttgaatatggtttttattatttttttattattatggataaattatttttattattgagtattggttttttaatatataaattgggagtaatatttttaattaataataatgggatatagtaggatggggttgttttttttattttttttatttttttttttatttattggatgagagtttttatataataattaattggtgttgtgttgtgttgtgttattttgtatttgtttatgagaggatattttgtttttaagatgtttattttaaagatatgaagagttaggaaaatggtaattgttgtttttaagtaagtatttggtgtagtggtagaataaagttggaattttggggttggggtagataaggaaagagggttgtagatttagggaagaagaatattttgttggttatgtgaggagtatttagtatttgttatagttagtgggagtaaaatagtatagagataggtaaattatgttgtggattgtgagtatatttttgattagttagtgattattttattttttattgtttttaattggagatttatattaagttatatatataaatatatatatagtttatttgggtagggatgaataagaaaatcggttttttttataaagatttgtagttgaaatttatattatttgtatggtttaaaatgggaatttattgatgttgtaagtttatttagtttagtggagtatagtgtgggttagataaggatgatatgaaataatgaatgtaaaatattagtataggaagcggaatatggtatatgtgtaaaatattgtttattttttgtaaagttaaaatagtatgtatttatttaaaggatttgggttttcgagttagatagatttggatattttgggattgttttgattagtatgatatatagaaagttatttgaggttttatagagtttagttttttgtttgtaaatatttttttttgtgtgaaaattaaattaaatagtaatagggtttgtaatatatttgatataattgttggtattgtaatttgtggtgttaatgataacgttagtgatgatgatttttttttgtagggtattatgttttttagggaatggtgaattttagaggttaagttttattttaaagttttatgttattttatgaaaaagtatttgggataaaataggtttttgagtttttttaaaaatagagtatgtgagtagttggtatggggattcgagttgggttggggaaagaggtaattatttttattttttttagtatgttttattttttttgatatttttaaattatttatattttttttattaatattttttttttaatttgtaaatataatttttttttattataatgtaatatatatttattgtagaaaaattattaaatattttaaatgattaattataaatttaaattattttatgatttttatagtagagatatgtggttttatttttttttagttagttatatatttttttgttgttgttttattattggatgtgtgttattttttttttttttttttattttttttttttttttttttttttttttttttttttttttttttttatttttaaagttatgattatagattttagtggtttatagttttgtattttttaaatgttattttttaggttagtttatttttataattttttagggggttgttttttattttgttttttgtttttatatttttttattttttttatattttttatttttaggttatatatttattttttttttacgtaggaaaaaaaggaggatttaggtgagaaatgtattattattttattattatttttaaatttgtatttgtatttttagtttttttattagtgatgatggatgattttcgtttttaagattatttttgtatttaagtataagattaattttttttttttttatattattaatttttattttttattggtttattatttttataggtagacgtgttgtaatatttttttttaaaaaaataaataaaattggattaaataaattaaaataaaatttttttatcgaaatttattttttgatttttgattttatgtttttttgtaattattgttttatattatggtagtttttataggataatttttgagtttattttttatgtagttttttgaaatattgtattttttgttgtttgtttgtttgtttgtttttttgatacggggtttttttgtgttgttttggttggttttgaatttttgggtttaagtaattttttttttttagtttttaaagtattaggattataggtttgagttattatatttggtttgatagtataatgtttttatatttttttttttttttttgtaaatatttttttattttattatgatttttgttttttaaattatttaatgaattgtttatttttatgattttgtaattatatttttaatttttagagttcgtttttgtgtataattttatataaatgagtttttattttataaatgttatttatttttttatattttttatatattattgataatagtagtaggggatttgttgggtttttttgttatttttttttatgatattatgaaatttttttttagaatttataaatgtagtggttttatatttattttggtaatttttgttaaatgttcgttttttttatgatagtgtaagttttatattattaagattttattttagttttttttttatttttaatgtttagttaatattttgatttattttgaaatatatatcggatgatggattttagtgtggtgtgggtagtgaagttatatatgtttttttgttttttcgagttttaagtttagtagttgtttgttatagaatgtttacggatattgaaatggtttatttgtatggggtgtagagttatatttatttattttatgggtagagtattaataaaagatgagttaattaggtgtttgagagaagattttttggttttaatttagttttattatttttttaatttttttgagttatatagtagatttttgatgggttttttttgatgattaaattatatattgtttatgtattatatatattattattgattgagatatattaagtgtttataatttatagttaatattatattgattatattattttggttgtttttatttttttgttttataaacgataatttaaggaatatttttgttatatatttttaaaaacgtgtgattttttttttaggttatatttttagaagataagttttttgtattaatatgatttttttgagatattttttaaaaatgttttttagatattggggtgttttttttttgagatggagttttattttgttttttaggttggagtgtagtggtgtgattatagtttattgtagttttgattttttcggtttaggcgatttttttgggattataggagggtgttattatgtttaattttttttgtattttttgtagagatggggtttcgttatgttgttttggttggtttggaatttttggatttaagtaatttgtttattttagttttttaaagtgttgggattataggtattaagttaatatgtttgattttttagaaattgtatgttagtatttaattttattaatttttatgatagtaaattttttttattttttatttaatattattatttttgatttttatttttgttaagttaagatatattaaatttttattttattttttaatttatattttaattttgttgatatttatttattattattatatttgatatttgtattttttatgttaaattatgttttaatatttattaatttttttttaaatgggacgtagatatttttaaatgttgaatttaagaaagaaaataagaagtttttgatatttaggaattgatttgatatttatggttgggattttttgttatatgaagttggtttaatgtttattgttaagttatgttatttttttattggattataattattataaaatattaatattagaaagtttattttgagatgatgataaagtgaggaaatataagaatattttataattttgtttaagtattttttttattaatattaggggttgatgtttgtttattaattatagttttattttgttttagtttatttttattagagttaagatttgttgagatatttaattatagaattgtttttgttttttgacgagtatttaatttagagtgaagtttatttttttattttttttaggattatttaattaaagtttaaattttttaagaatttttttttaatatttttttattaaaatattatatggtttatagtatttatttttgtatttaggaattagtaataaatttaatttttttatttattaggatatgtttttagtggattttggaagaaagtttcggacgtattattattttgtttataaattttttatgtgtttttgaggttgattatgagaaattgtttgtatatatttatgtttgtggttattaaagagaagttttttaatttataagtatttaaaattatttttatatttttttatggtgtttatttttaggttatgtttagagaatttttttttattgtttaattgtagatattttatgtatagttttagttaggttgtgataatgaggaaagaggagtttaagggtgaagaaaataaaattgttggaatataaggggaggaggggtagtaggtaaagaattttaaggtttaagttttttgttttataatttaaaaaatatgtttatagagtttttaggatatttgatatatgttatatttaatagtttgttttgagaaaaatggatatttattttttttttgtatttatttggttaaagtaaataataataatagaattttagtgtaatatagataatgattagttttggtaatgggtatttttgaatatttaaaatgttgaggtgataaattatgtttcggttaatgtttgtattttttatttatatatatatatattaattagattttcgtgggtttgttgtgttttaaggacgtgtttaaggtttatgtggataaattcgtgatttttcgatgaagataatttaatatatatttaatttgagagttttattatatattttgggggagattgaaaattatgagtattttagatatgtattgttaaatatggtaattattgggtatatatagtgtagggtttgtttttgtttgtttgtttttattattagtataaatttatttaatgggtaagatagattaatttattttaatataatagaatataaatagttaatgatagggttttaggttgtatttaatttttaagaaattattatttgttaggatttttagtattatgttgaaagaagtggtgaaagtgggcgttttcgttttgttttagtttttagggggaatgtttttattttttttttgtgtagtataaggttggttgtgggtgtgttataaagggtttttattattttaaggtatgttttttttatgttgattttgttgaggtttttaattataaagggatgttggattttatcgaatatttttttgtattttattgaaacgattattttagagagagagagagagagggagggagggagggagagagagagagagagagagatggggtgaaggaataggttgggaatttgggaggagattcggtcgtaggcgcgaagtttggaggcgatggtgagttttgttacgcgtgagttacggattattttcgtcgcgttttgtatttcgtttggtttttttttttttagtttttttttttttttttttgttcgttgatttttatttaggtttttttcgtttaagaattttagaagggatagaattaaggatgaagtgtggtatttgaatagggtttacggttagattttaggaggttattttaagggtttatattgtattatcgtttgtggttataaagagtttttcgggagaattttttatttgtaggtttggttagggagattttgtgattattttagtgtttagagaaggaaattgaagtttagggttttgtagaggtttgtttaggttatatagatttttagttagattcgaatagttaaaaatttaggtgattaaaggcggagtagcgttttttaagagttcggagagagagaatattttatttttggacgttatattttgtagttcgttgttgggaaattttaaggggtatgcgattaggttggagtattttgggtttagggtttacgaaaatggtttttattgttggaggggattttgaatttagaatttgtttttaaaaaagagaaagaaaagtagatttgggtgattttaaaagttttaaattatttttttacgtattttaaaaaaaaaaaaaaaaaaaaaaaaaaaaaaaaaaaaaaaaaaaaaaatttttatttttaatatataaagatattgaaaatttaatagtttaaaaaaattaataaaataggaaagtggataaaatatatgataaatattttttttaaaatgatatgtagatgggaagtgaggatataaaaatgtggtttatatgcggagtttgtagtgagtcgagatcgcgttattgtattttagtcggggttatagagcgagattttattttaaaaaaaaaaaaaaaaaaaaaaatgtggtttatatgatttattattggggaaatgtaattaaaattattatgagatattattatatttttattagaatgaataaaataagaaatagaaataatattatatgttggatgtggagaaaatggttgaattatttattgttggtgggaatgtaaaatggtatagttattttagaaattagagtatggcgaaaaaaaaaaaaaaattaaatatgttattgtattttagggtatttattttagagaaatgaatatttaagtttatatcgaaattagtatatagtatataaaggttcgtagtagagtagagatttgagtaggaaaaaaaaaaaaaaaaaaaaaaaatttattgttatagttagatagaattagttttggaaatttttaaaagaattagaagttattaagatcggtagtttattttgggtagtgatagtttttgtttaagggagatataatttgaagaaggaaaataagattaaaattgagaagtaattttttaattatagtgtttgtaaatatatagttaggaaagaatgttagtatagaggttagaaaggtagttatttatggagttaggaaagggaagaggtgtgatgggagggggtaagtaaggtatttgtgggatattggataattgtgttttttgatttaggtggtgtttgtgtggttatagtcgttagttaaatattgtgtatatttgtaagtaatttttttgtatatattttatattttataaaaaaagaaaagagattagattttttttagaaaaataatgaaagaaggaggtgttatattaagattagttaaattttttttttatatttgtaaatttatttaagtattagttttgtgatttttagtttttttatttttattgagatttagtatttgtaagagtttaagaataagattatgggtagattatattgttataaaatagaatttgttttttgtgatataatatgagggattttattttattttttaaaataggtattgaataaaggtttttatttttagaaatttttttttttatttttggatttatttttgagattgtagaatgtttttggttgaaggtaaagttttatttttatgattttttttttttttcgtttatttttttaagatttaggttttttttttatgttttagattttagggtttgttttagggttaggattatagtttttttttttagagaggaatttttaatgaagttgatttaatttgttttggagagtattggaggtatttgttaagtttttttttttagtggagagaaattttagtggaattttagagatttttggtaaatttattgtagattattttgttgaatttatttttatatttattattgtaaggaaattttaaattgagttttattaaaaagtaatttcggtttttatattttttttttagtgtttttttagtttattaggtaagtaattatagtgtgtttttattaattaataaatttttaaaatattggttttatgaatagtgtattgattagggttttttatagaagtagaatgaataggcgatatatatttttagttgatttgatgaggtttatttatattatggagggtaatgtatattagttaattttattgatttaaatgtaaattatttttcgaatatatttatgggaatatttagaataatgtttggttaaatatttgggttttttcgtgatttagttatgttgagaaattaaattaatttttataaggaataaattagataatatttatttggatattagattagagttttggatatattaagtgttttgtaaatgttagttttataaatgtaaggtggtgttttagatttatagaatatagtatattttaaggtattataggtttgttgatgaattttgttgggaaaaataatatatgggaaatttagttgtggaaattgaattttgttattttatttttgtttttgtttttttgtgtgagtgaaggagtataaggtaaatttttgagtatacggggtatgtattaaaggggttttatttggtatttggagttagttttgttatattataggaaaattaaatcgttatttaagaatttttttgttagtttttacgttggggattggttggtttatttagtttggttggttgattttaaaaatatgtgtagggaggtagagtgattaaacgtgaagaatggggaattttggaagtgtagaattgaagtttagaagggaatagaagtttttttttattttatagaagatgattaggagatgtttatttttgggatagaaaatttattggatttggagatttagtgagttgtattttcgattttattattggagggaggtgggagaggtatatgagtgagtgtggaggggtttagaagtttagttagttagtgtgtaggttgttttgtagatttttattagggttgttttgaagtttagagggtattttagaggaggaagggaatgataaagtttgtttggggttataggaaaagaggagagaggtagattgaaggaagtttaagattataaagtgaaagaaaatgttttttagttatttaagatattgttagatatagattgggagtagtggtttatatttataatattagtattatggtaggttgaggtgaggtcgggagtttaagattagtttggataataatgtaagattttatttttataagaaataaattaataaaagattttttcggatatgattagaatttaagaggtgggtatttggtagagttatatgggaagaatggagtaatgggtttggtcgttggggtggggaaatagggaggaagggaatgaaaaaaatttttgagggtagatgatggtgttagtttgagaattaagtattagttttattttattgtgtatttagttacgttggtatagatttttaggtaggaggaggagtaagcggtgggattagttatatgtgggtttttaaaggtaattttaggtgttattttttttttatatttattaggaattttaggtttttttttgaagtgatattattttgtattttttgtatttttttttttatttttttttatagttttttttttttttttttatttttttggttaggatttatatttattttatttaattttttttttttgattagttttatagtttagaaaggaatagaaatgttagttgaataaaaatttatttcgtgttttttgggtatgtatttgagaataataatattgttttcggttttaatgtatttttattatatttgatttttagttatgtggggaaggttatttatttgattaatttattatttagtgaaggaaattgaggtttagagttttgaggatgtttgtttaaattattttgttttttagttaaattatttagaataggattttgtaagggttttaagagttagagaagatagtagtttttcgtgttggatttttttgtttgtttaggaaattgggtgggaattatttagattttttttgtatgaaaagggtgatttgtgtttttggggattttttagtggttttagttgtttttgttgagggtgatttgtgtttttggggattttttagtggttttagttgtttttgttggggatgattttaatttttgaatttaattttgtaaaataagaagaaatttagatattgtaaggtatgaaaaatttttttttaatagtaaaggtgaaggatgtattcggagaggagggaatatattaagaagagaaggaaggaatatatattgaaaagaatataaaataaaaataaatagattaagacgtgggatgtatagaattaggtattaatttatgaaaaggtgaaaaggtgaaaaggtaataggattagaaaggaagagggtcgtttgggtgggtggatagtatagtagaggggacgttatttttaagaagatgattttgataagagttattataagtttaaaggtatggagaagatatttatttaattaagggatagttggtgaatttatttgttaaggtttatggaaagtaagaaaatgaaaacgtcgggtaattattaattttttgaaaatattaatatgtatggaaagaaaaattaagagagtttattatgtggtttaggtttgagtagtatttacgtaagttagtaattttaattttggtttttaatgtatttaaaatttttatttgtttatataaggaggatgaaaatgtgtgtgttgtggaaggtattatggattgaagggattttgaaaagttaatatttaatatttaaaatggaaatgtttgaagtggtataaatgtatattattaagagatataaagataaagaataatatatgaagtaaaaggtttttatgtggttgtttgttaggaagttggtggttaggaaggattgagagggagtagaggggagattatgttttgtaataggggaaatgaaagggaagtaggtagtatttggagtttgttttatgtagagaatagggttttacgtagtggtttaggattttagggatttattgtggttgaggttatttgtttttaggataagtttttggtattgagtttattgaaatgtgggtagggagaagaggaggttttcggattttttatttgagtagtttggtttattttaggttttgttttgttttttgtttagagattaatgtaataaattgtttttaaatttatttaagggagtggagtttttttttttattttcgattttttttaatattattttttttggaagtgttattttgaatatgttttcggatttgtttttattagtggagaaagagaggatagaagagtatttatttaatagagttagagggaggtagttttaaggattttagtggttattagagtttattaggatttagggttggaggtgtatagtgagatttttagcgtagagggagaaattttttaagggtaggaaggaataatagaattggggagtatttttttattttatagtaagtgtaaatatgatgggaaggtatagagaaaaaggaagaaattatagggaaatgtgtttatttagggggaggtaatattgcgggaggggtataatagatttagtattggtgggggttaggagaaataggtataatttttgattagagaatggatatttgaggttagaatagttattaaatgaagaggattatatatattttaaggacgttgatttacgttatattttgttattggaatttaagggaaaagaaaggaaattaataaataaaaataggttgtatgtggtaaaattaatagttagttttgggatttgtgtttgtaaaatgttttatttaggtgcgatatcgttgacgttttggattttttattttttagtatttagtttttttttttgtaatgagatcggggttaggaggagagatggatagatgagtttatgttgaaggtagttagttatttgtgtttgtagatgagaaattgtagtttgtattattagtttttagtatagagattttattttagtttagtatttagtatttagagatgtagtatttagtatttagagatttttaaatattgaggggttttgtttagtttttttttttatattgtggggttttggtttttttttttaattttatatttttaaatgttggtataatgtttaggtttattttggatatcgttttattcgataggggaatatttttgatttagacgttttgataatttcgtttagttttttttggagagagtcgttaaattttttgttgatgagttgagattgatcggggaattgtgatttcggatgtggttgaggattaaaattaaaattatagtcgatttttaaagattaagtaggttttaattacggaatttttttttatttattgatttttttaaaagaggaagaagttttttttttaagtatattaagttgaaaaattaagttgaagtattaagtatatttagtttttattaagttgaaatagtaaagcgttgaaatagtaaatcgtaggtataatagaaaaattttaatttaaatagtgttgagttgtaatttgtttttcgcggtttgtagtcgaggaggagtttacgaggttttagttgttgtaagatttaagcgcgttttcgtttagcggtggtttcgggtttagggaattagcgttgttttttttcgaggttcgcggtttgagaaatttttcgtttcgaatgcgggttggttttttcgggaagttttgaaatttaatttttgggtgggttaggaaggttgttcgagttgggtagcgtcggtcggggtattttttagagtcgagttgttcgtttttttcgagatttagcgtagtttggaggagagatcgggtttttttaggtggggtatttggtgattagagattttatgagtttttattttttagtttggggcgggatagtttaatcggatgttggggggttcgtttggaaattattttttgttttgaggatacgcgcggagtttttttgggagtaggaggttttgaaggaagaggggtagacgcgaagtttttggttagtcgcgttttcggtttaggtttttttgtgtttatattaggtttttcggttttttataatagtgattttgatagcgtttagagttcgcggtttttatttagttttttttttttttgcgaggtcgagagggtgtagagttggtggttttaggaggtggttgtgagcgcgggtttggggttaagagtagaggataggagaagattgttaagttattatcggttttgcgatatatttattagttgtcggcggcgaggttagattttagattcgggtttgtttagtaggcgttcggcgtttatgttcgttttttatttttttgttttttttaaggaggatttggtttattaggaagttcggggcgttttgtggattgggtggttaaaaatggtgtgtggaggagggagttaattgagattagacgtgaaaaacggggaatttggggatcgtaggttggggtttaggagaggatcgaagtttttatttaagattaagtgaggaatattgcggtaagaggaaggaagattgagtcgtagttgatttgtggattttatcggttttagtttttgtgtgatcgttagaagtttgtagttttatttttgatgagttttgaaggtttttgaggagagttgagtttaagagattttttaattttacggaggtatttcgtttgaggtaggttttttttgtgtttagggaaggaaggttgggagtgagggtatttgaaaatatttatatgagaaaaggttaagtttatttttgttattttgtattgaatatagattaattaattggttttaggattgatagtaataggtttataattggttttttggtttttatttagttttttttttataaagttagaattttgtttttttggaatagtgaatttttagtagaggattttagtttgggttgtttggaatttgttattttgtttaggagttgttaatatttggagcgtagtgtaggaagaatgtaggggcgtttggtggggaggtgagtgagtgtagagggttttcgggaattttttgggtttttggggtagtttttttttaggttgttttgtaggtttttataaggtttattattgagtaggaagaatgtttttaggagaggtaaagggtggggtaaaggcgggtatggggtcgtttgtattttgtagtaaattggagagtgagatgataggtaaggagtattggtttttatatggaaatttatattatattgtttaaagggaataggaaaggaattatagcgaggtttataggggagggttgggggaagttttatttagggcggcgagtgtagttttagtggtagaaattttagcgggtttttttttgttgtagatttcgttttttttgcgaggttttagacgaagttcgatttttagttgtttgcgtagtttttaggtaggggtcgcggggtgtttcggcgagagagtttgggttaaagcgttaaaattcgtcgttgtcgtttagtcgtagtttgtttggggttggggagttttttttggtcggtgatcgtcgcggataatagacgagattagaaattagatttggtttcgggattaagaatttttaattagggaatggagatggtaggggacgaggtttaagagatgtagatagtaggttttgtttgtttaggtcgtaaaggggaaggaaggggcgggattcggggttttggattggggttgggaagggttcgttttaggagggtgtgggtttcgatgtttgggttttggaggttcggggagtcgcggagggattttttttcggtaatcgacggattggggataaatgttttgtttagtttgattttagatatttttgtaatttaatatagttatagtttcgacgttatgttttttttgggtttagttttaacgttatgttttttttgggtttttttaaagtagggttggaggattaattagtggatttcggcgaggaggtatttttttttttggaagtagtagaataaattttagggattcgggagtttaaggttttattttaaaaatattgagagattgggtattgggcgtatagtatgtttgtggggttacgtagatttgggaattagattttagggtttgtagatttttttttgttttgagattagattttatcgttagtaattgggaggaaatatttgtattttaggatttggagatatcgatacgggagtagggcgttttcgtgtgtatagagttttgttttgtagttggaaatcgaacgggattttgtggaagtcgcgggtggggaagcgaaaggggagttgagtgtttgtttttagtttttgggttatacgggggcgttgtcgttttgcgttcggattttgatgagtcgttttggagaggacggggcggtggtttgagtaagatatagattgttgatttagaaaggatgtattaatgaggtggggttggggttgtttagggggtggaaaggttttttgagaagttttggattgcgcggggtttcggttttgcggaatagaggagggttttggagttgtttgtttttgaagtttttaatttttttttgtaaattttttttttagtttttttatggtaatattttaggaaaatggaaagttgattattttttttttttattttttaattttttcgtgattgttatttttaaataattttattttagaagagttttaaatttatataaaagttgtaatggtagtatagagttgttattcgttttatagttttttttgatgttaatattttttattattatggtttatttgttatagttaatgaaggtatttttatattttattattattaaattgtagattttatttggagtttattagcgtttttttaatgttttttttgtgttttaggattttatggagaatattatattatatttagttttcgtcgtgttttcgcggtattttttggtttgtgatagtttttgagatttttttaatttttgatgttttttataatattgggaagtattgattagatatattgtaaaatgttttttaaattgaatttagttggggtgtagattatggttagattatggttatgggtgtttagatgaggtgaagtgttattttttaaatattttattaaggttatagaatattaattttatgtattattgttgatgttgaagttgattatttggtatattagttttttgtagttgttataataaatgtttttaaagttggtaatttataataatagaaaattatttttttatagttttggaggtttaaattgtaaaattaatatgtagggttttattttttttgaaggttttaagagtaaatttattttttgagttttttagttttggtagttgtagggtattggttagcgttttttggtttgtagttttattgttttagtttttgttttattttttatattattttttttttttttgatttttttttttgtgtatttgttagaaagatatttgttattggatttagagtttatttgggttatttaggaggatttttttattttagtatttttcgtttaattatatttgtaaagattttttttttttaaataatttgatatttatagtttttgggtattaagatagaaatatatttttgtggggtttattatttaatttattatatttggttaagttaatatttttagaatggtaatttattagtgtattttaggttataatttttatttttatttttaaataaatttaatatatttggatatttttaatgttatgttttttaggttgaataatttagtgttagaaatgattttgaagaaagattatttttggaagagatttatattgagtttgttgtttgattttttttttgtttttgaatattttttgagagtaaaatttattttttaaaatggtaaggatgagttaattttttaaaagttgtttgggttgttgttattattttatgtgagtttttagtttttttaaagagaaattttttgttgttaggataaagtggtatatgaataaataagatttttattaggtagcgtgttagttttaagaaaattttggagaaaatggtgataggatagataattagattataggttgtttgtatattaagtaaaaataaaaattttatgttaggtatatattattaaaaaataaatcgttttaatttttattatttttttatagagattatagaattttttttttgttgttgagaaattaataagaggtagaataggatgttaaaattttaaagtatttaatataggtttttttttgggatttttgttagttatatgtttaaaaattattgttagtggtttatgtttgtaattttagtattttgggaggtcgaggtggaaagattgtttaagtttatgagtttgaaattattttgggtaatatagtaagagtttatttttattttaaaaaattaaggtcggtcgtggtgttttacgtttgtaattttagtattttgggaggtttaggtaagcggatcgtttgaatttgggagttggaggttaatttgattaatatggagaaatttcgtgtttaataaaaatataaatttagttagatgtggttgcgtatatttgtaattttagttattcgggaggttgcggtaggagtatagtttgaattcgggaggtagaggttgtagtgagtcgagattatgttattgtattttagtatgggagaaaagagggaaattttatgttaaaaaaaaataaaaataaataagaaaagaaaaaaattaaggtcgttttttgtgtattttttaaaattaatggatagagtatagtaaagttaatttggatttttaatggttatttttggggttttttgagttttttaaatttgttttttttaaaattaaattaggttgggcgcggtggtttacgtcggtaattttagaattttgggaagtcgaggcgggtagattacgaggttaggagattaagattattttggtttgtacggtgaaatttcgtttttattaaaaatataaaaaattagttgggtatggtggtaggtgtttgtagttttagttattttgggaggttgaggtaggagaatggtgtgaattcgggaggcggagtttgtagtgagtttagatttagttattgtattatagtttgtcgatagagtgagaatttattttaaaaaaaaaaaaaaagaaaagaaaagaaaagaaaaaagaaagaaatttttgtattatttatggatgttaaatttatttgagtagattttaattttaagtttgtgaatagtttttttttaaaatatgttgaatttggtataagagttagtaatttagggaaattatgtgtatttttgattttgtttatttgataaattatttgtttgtttttttgaggattttattaagaaaattgtttaaaaatttttttttaaattttttttttttgagatgaagttttattttgttattaggttggagtgtagtggtgtagtttcgatttattgaaatttttattttttgggtttaagtaattattttgttttagtttttcgagtagttgggattataggtgtttattattatgtttagttaattttttgtatttttagtagagacgaggttttattatgttggttaggttggttttgaatttttgattttaggaatttttgattttttaaatgtttttatttgttatgttatttttattgataaaataaaaataatgttattttgtgttaggttgtttttgtattgttataaagaatatatgagattgggtaatttataaagaaaaatgagtttaattggtttatagttttgtaggttttatgggaagtacggtgttggatatttgattagtttttgatgaggtcgtaggaagtttattattatggtagaaggtaataggggagtaggtacgttatatagcgaaagtaggaacgagagagagagtgggaggggaaggacgttatatatttttaaataattagtttttattattttaaagatagtattaaggggacggtgttaaattatttttgagaaatgtgtttttatgatttaattattttttattaagatttatttttaatattggggattataatttaatatgaaattggggtggggataaatatataaattatattatatttttttattgttgaatttaatatttgtttttgtataggtaaaattgttgatattggtaaattttataatatattttttataaaaatttagtttgatttattaaaatttttgtttaatattaaataatatttatttaaattagatggtgttataagttattaaatttattatagaaggatataaaaagtaaggttttattattttatgtatttatttttttaatattttaattttatttattaaaaattaaataattgggattaaaggtttgtttaggaattttgagtaataaattatatagtgattttaagatattagtggttttaaatttttatattttattaaatttataatttattgataggaggttttttattgttattgatttatgaagtgtattttttagtaatttagtggattaggttagttagtatttttttgtttttattttggaaggttaataatttatttggatagtaaagttttttgtttttattgaaaattttttttgtgttttttaaatattaaaggaatatttggaggagatagtttttttttaaggttttattttattataatatatagatggtcgttttttttgttttgttttatagatagtttatgaaaaaaatggtgtatatttgttaaagtaattgattgttaaagattatgaagtttttgacgaaaaattgtagttagtgaaaatttagaagaaatatttgggatatttaattttagaaaatggattatatttagatttagattggtattttgtaatttttttagttaagaattaagtgttatagaaaaatatagaatattataatgttgtatttgtggtgtgtaaattattcgtgttttaagtagaaagtataaaaggtgaattaataaaaaataataattataagattttttaatatatagacggtataaggttagttgtagtggtttatgtttgtaattttaggatattgagaggttgaagtgaatagattatttgaatttaggagttttagattagtttgggtaatatggtaaaatttagttttttttaaaaaatggaaaaaattagttggttatggtggtatttgtttgtggtattatttatttaggaggttgaggtgaaaggattgtttgtgtttcggaggtagaggttgtagtgagttgagattgtgatattgtattttaggttgggtgatatagtgagatttttatttaaaaaaagatatagatggtataagaagatataaatagaaataataaaaagttaaaaagaaagaggatggagttaaagtgtgaatttttattatatatttttcggtttttgtttatataagtagtgttaagtttttattagattaaaataatggttataagatatttgtaagtagtttggtgattttaaattataaaaaatgtaatagatatataaaaaataaataataggaaattaaattatattattagagaattatttttattaaaaggaagatataaaggaaggaaagaaggaagagaaaataagtaaaataacgagaaaataaataagaaaatgtttttttttattaataataatattgaatgtaaatggtttaaattttttaattaaaagaaatggagtggtggaatgaataaaaaaaaaaaataaaaaaaaaaaaaaaataaaggatttaatgatttgttgtttataagaaatatatttatttataaatatatatatagattgaaaataaagggatggaaaaagattggttatgttaatggaaattaaaaaagtgtaggagtagttatatttatattagataaaatagattttaagataaaaattataagaagagataaagaaggttattatataatgataaaggggttaatttagtaagatgttataataattataaatatatatattttaatattggagtatttagttgtataaagtaattattattagagttaaagagagagatagattttagtataattatagttagagattttagtagttttcgttttagtataggatagatcgtttagatagaaaagtattaaagaaatattggatttgatttgtattatatattaaatggatttaatagatatttatagtatattttatttaagagttgtagaatatatatatttttttttaggatatggattatttttaaagataggttaaatatttggttataaaataagttttagaatatttaaaaaattgaaataatattaaatattttttttgataataatggaatagaattggaaattaataataagaggaattttggaaattatataaatatatagaaattaaataatatgtttttgaatgtttggtgggttaatgaagatattaggaaagaaatttaaaaattttttagggagaggggtggagtaagatggttagatagaagattttattaatcgtttttttgtaataaagatattaatttaataattatttatatttaaaaaaagataaaattatttttattagaaataaaagttatgtgagtatttataaaatttggtttttaattttatataattgaaagaaatattgagaagggtaggatgttgtttcgaattgttaatgtcgttttagttttattttttagtagtagttttgtagtgtggagaattatgtatttgggagagggagaatatagcgattgtgatatattgcgttgaatttagtggtgttttgatatagagttatattggaagaatggagtaatgagtttggtggttggggtggggaaatagggaggaaaggaatgaaataaatattcgagggtagaagatggtattagtttgagaattaggtgttagtttttttttattgtgtgtttagttatattggtgtagacgtttaggtaggaggagaagtaagttgtaggattagttatatttgggtttttaaaggtaattttaggtgttattttttttttatatttattaggaattttaggtttttttttgtagtgatattattttgtattttttgtattttgttttttatttttttttatagttttttttttttttttttttttatttttttggttaggatttatatttattttatttaattttttttttttgattagttttatagtttagaaaagaatagaaatgttagttgtggttaggtgttttaaaaatttatttagtgttttttgggtatgtattttaggataataatattgtttttggttttaatgtatttttattatatttgatttttaattatgtgagttaggatatttatatggttaattaattaattagggaaagaaattaaggtttagagttttaaggatgtttgtttaaattattttgattttggtagaataggattttttaagggttttaagagttagagaagatcgtagttttttgtgttgtattttgttgtatgtcggggaaattggatggaaacgatttagattttttttgtatgaaaaggataatttgtgtttttgggaattttttagtggttttagttgtttttgttgggtgtgatatcgatgttcgaatttaattttgtaaaatagggtgaaatttagatattgtaagttatgaaaaatttttttttgatagtaaagttgaaggataataaaattgaaggagggaatatattaaatagaggaggaaggaatatataaaaaataataataataataatattaattaataataagaataaaaaaaatattaagatatgggatgtatgaaattaggtattaatttatgaaaaggtgaaagggtaataggattagaaaggaagagggttatttgggtgggtggatagtagaggggaagttatttttaagaagatgattttgataatagttaatataagtttaaaggtattgagaagatatttatttaattaaggaatagttggtgaatttatttaaggtttacggaaagtaagaaaatgaaaatattaggtaatgattaaattttgaaaattttagtatgtgtggaaagaaaaattaagagagtttattatgtggtttaggtttgagtagtatttacgtaagttagtaattttaattttggtttttaatgtatttaaaatttttatttgtttatacgaggaggatgaaaatgtgtgtgttggggaaggtattatggatagaagggatattgaaaagttaatatataatatttaaaatggaaatatttgaagtggtataaatgtatattattaagagatataaagataaagaataaaatatgaagtaaaaggtttttatgtggttgtttgttaggaagttggtggttaggaaggattgagagagagtagaggggagattatgttttgtaataggggaaatgaaagggaagtaggtagtatttggagtttgttttatgtagagaatagggttttacgtagtggtttaggattttagggatttattgtggttgaggttatttgtttttaggataagtttttggtattgagtttattgaaatgtgaggagggagaagaggaggtttttagatatttgatttgagtagtttggtttattttagattttgttttggtttttggttagagattaatgtagtaaattgtttttaaatttatttaagggagtggagtttttttttttattttttatttttttttatattattttttttggaagtgttattgtgaatatgttttcggatttgtttttattagtggagaaatagaagatagaagagtatttatttagtagagttagagggaggtagttttaaagattttagtggttattagagtttattaggatttagggttggaggtgtatagtgagatttttagcgtagagggagaaattttttaagagtaggaaggaataatagaattaggaagcgtttttttattttatagtgagtgtaaatatgatgggaaggtatagagaaaaagtaagaaattatagggaaacgtgtttatttagggggaggcgatattgcgggaggggtatattagatttagtattgtcgtggggtaggagaaataggtataatttttgattagagaatggatatttgaggattagtatagttattagatgaagaggattatatatattttaaggatattgatgtatattatagtgtattattggaagttaagggaaaagaaaagaaattttataaataaaaataggttgtatgtggtaaaattaataattagttttgggatttgtgtttttaaaacgttttatttaggtgtgatatttttgatattttggattttttattttttagtatttagtttttttttttgtaatgagattagggttaggaggagagatggatagatgggtttatgttgaaggtagttagttatttgtgtttgtagatgagaaatcgtcgtttaatttttttgaattttatgcggaaaaaatgtttgtattattagtttttagtatagagattttattttagtttagtatttagtatttagagatttagtatttagtatttagagatttttaaatatcgaggattttgtttagtttggtttgattatgtttttttttttttatattgtggggttttagtttttttttttaattttatatttttagatgttggtattatgtttaggtttatcgtggatattattttattcgatatggtaatatttttgatttagtcgttttgataatttcgtttagttttttttggagatagttatttagatttttgttgatgagttgggattgaggggaaaaggtttgcgatttttgatggggttggtaatggatattaaagtcgttttttaaagattaagtacgttttaattacggaaatcgtttttaattattgatttttttagaaaaggaagaaagaagtttttttatattaagttgaaatattaaatatattaagtgttgattaagtagattaggtatattaagtggtaaatttggtaaatttagagtattaagtatattaagtataataaatggtaaatttggtaaatttagagtattaagtgtattaagtttattaagtaataatattagtattaagtggtatattaagttgaaatcgtaaatcgtagttatggtagaggaattttagtttaaatagtgtggagcggttattggttttcgcggttcgtagtcgcgttcgcgaggaaacgttagggaggttttttgtttcgtttagcggtggtttagggtatagggaattacggttgttttttttcgaggtttgtggtttgagaaatttttcgttgcgaatttgggttggttttttcgggaagttttgaaatttaattttcgggtgggttaggaaggttgttcgatttgggtagcgtcggtcggagttttttttaaagtcgagttgttcgtcgttttcgaggtttaggcgagtttggaggagggatcgggtgcgtttagatggggtttttggtgattggcgattttatgagtatttattttttagtttggggcgggatggtttaatcgggcgttgtgggggttcgtttggaaatcgttttttgttttgaggatacgcggggagtttttttggaagttgtgaagaggggtagatacgaggtttttggttagtcgcgtttcgggtttaggtttttttgtgtttatatttggtttttcggttttttataatagtgattttgatagcgtttagagttcgttgttttcgtttagttcgttttttttttacgtggttaagaggacgtagtattggcggttttaggaggtggttgtgagcgtggggttggggttaagagtagaggattagagaggagtttttaagttattatcggtttcgttatcggttatcggttaggttaggttttagattcgggtttgtttagtaggcgttcggcgtttacgttttttttttatttttttgtttttttaaggaggatttggtttattaggaagttcggggcgttttgtgaattgggtggttaaatacggtgtgtggggaaggggttaattgagattagacgtgaaaaatcgggaatttggggatcgtagggttggggtttaggaggggttcgaagtttttatttaagataggtgattaagtgaggggtataggtgtaatagaaagaaagattgatttgtaattgatttgtaggtgtaatcggttttagtttttatttgattattagaggtttgtagttttatttttggtgagttttgaaggtttttggggagagttgagtttaagagattttttaattttatagaagaatttcgtttgaggtaggttttttttgtgtttagggaaggaaggttggacgtgatggtttttgaaaaaagttatatagagaaaaggttaagtttatttttgttattttgtattgaatatagattaattaattggttttaggattgatagtaacgggtttataattggttttttggtttttatttagttttttttttataaaggtagaattttgtttttttggaatagtgaatttttagtagaggattttagtttttaagttttatttagtttgggttttttggaatttgttattttgtttaggagttgttaatatttggagtgtagtgtaggaagaatgtaggggcgtttgatggggaggtgagtgagtgtagatggggtttttggaattttttgggtttttggggtagtttttatttaggttgttttgtaggtttttataaggtttattattgagtaggaagaatgtttttaggagaggtaagaggtggggtaagggcgagtatggggttttttgtatttgcggtaaaatggagagggagatgagaggtaaggagtattggtttttatatggaaatttatagtatattgtttaaagggaatgggaagggaaatatagttacgtacgtttatagaagatttggtagatgggagagggtagttttgaggattgaaatttttattttataggattttggatatttggatatttgtttttttttgtgtttttgtacgaattttaggattgtgggatattttttgtatttttatttttgtaattttttttttttcggatggtttttttttttttggagtgtagtagtggttattagatttttgggttgaaggttattgggtgattgtgggattttggggttagttattttttttttttagttattttatgttttatagaattgagttttatagttatatttattttttttagtgaagtttaaaggaattattaataaaaaatataaaaatataaatggaatgatgtttatggaattaattgattaacgtggaaaagtatgggttttttagttttttgtttttcgtgagaatttaattttgaaatattgattttatgttaattttttgttttaattgggaatttttgtggttagtttgttttaagggtatttcgtgagtttttagggatggagaatagaaggttattttttttaaatatatacgtggttttgttttggttagattagtggatttttagtgttttttttgagttatatcgaggtgaattgtatagattagaaatttatattttaaaaagaataaaataaaataagtggtttgtagtgtgggggttggggttggtgcgggttttcggtttggtcgcgggtgtttgtatcgtttagtttcggggtttttgtgtcgggtttggtttggttttttgttcgtaagtttttgttttgtttcgcggcgttttttcggggcgggagtcgcgaggttcgggcgagttcgggcgggatcggaggttgcgaaggttgtcgggagcgggattcgtagtttttggatatgttagcgtttttggaagatttttgggttttgacgaaagataagttgatgagtgagttggtcgttattaaagtgaggttttcggttcggagtagcgtagagattaggacgcgtagtttcgtttgtagtattcggttttatttttatttcgtcgttatttttatttcgtcgcggcgtcgatagcgagggtttcgttttttttagttggttttagagttaagttatttatagtaggaaagttacgaagaaaatagtttaatttagattaaaagataaagttgatttcgaggtaatcgcgtttattaatgaagatttcgtggattcgtttgcgaggtataaagagaaatttagttttattggagaataattaggaagcgatgtgagaaaaaaattttgaaatcgaaggaacgaggacgatttgtcgtttaggttggcgtgtagtggcgcgatttcggttttcggtttattgcggttttcgtttttcgggtttaagagattttcgtgttttagatttttgagtggttagaattataggtatgcgttatttcgtttggttatatttttttttttttttttttttttttttttgtatttttggtagggacgggtttttttcgtgttgtttaggttggtttttaatttttgagtttaagggatttgtttatttcggcggattaataatttaatttttagtagaaaatggaaggtagaattgaaataaaggttttaatagatattgtgataatgaagaagattaaagtaaagattaagtttgagaagatagaattattaaagggtagagtaaagattttagtaatattgaagaaaagaagatttgagatagttagagttatttttacgttggaataattgaggttgaacgtataagtggagttttagaaggcggagttttgtaggtttggagtagggagtttattagagatcggaggagaaggttaaggaagagggtggaaattagaatattttttaatagatagtgtagtaattttagagagtgtttttatagttgaaattttaatggttttaggatataaaattttcgttgttagtaggatgattggaaattttaagtatgtagtttttattttgtaatttagtaaatttttaaatatattttaaattttaaagagattattggggttgggggggaatagaataaagaagagtagaaagggatatttttaaggaaatgttgttttatgaagtatttatattaataggaattgttgtagattagttaaaggggttataggtaggttattagaatttattgagtttaggatggtagaattttttttatttaaatatgtttttaagtgtgtttttttggtagatgttaagttagaaaagataaaaaaagaatgagttatttttgtatggataaaaattttgttgtttgttgttgtagtaggttttgtttgtttgttttttggtttattaagttatagaaattaaataaggaaattttttttttaacgttttttttgatgattttagaaatttaattgaatggaatttatttggtatatttaagttggttttttatttttaataattgtattgaaaaatatttgtgtatttttgttgatttaaatagttaaaaaaaaaaaataggtgattttattttaataaatgtagtattttatgaaaagtaaataaaatatatataaatgaattttattagagtgtttttgaattttggattagtaggagattattttatgttatatgaaaattttttatagttttgaaatttttttgtaggttttttaaaattttttttttttattgtttaaatttatgtagggtttttttaaaatgtggatatttggttttttttttgaaaaatgagatatatatatatatatatatatatatatatatatatatatatatatatatatatatatatatatatatatatatatatatatatatatatatatatatatatatatatatatatatatatatatatatatatatatatatatatatatatatatatatatatatatatatatatatatatatatatatatatatacgtatatatacgtatatatatgaaataagaagggaaaaatatggtaatatagtatgaagttatatatttaaatattttgaatttttatagaaaagagtggaagaattattttttattgaataaaaattttatagatatggaagataatgaaatttggtaagagaaaaagtaatatggttgtattttttgtaattgtaacgaaatttgatggtgtttatgaggaaaattatagtaataattttttttgtaatttttattaatagtaatgttagatttagaaatggtggtttttatgttttttcgttcgttgttggtggtcgttatttttcggattatattgcgggttgttgtttaggttttgggaagttttggattgtttaataattatggattttaagtatagtagtaatagtaaaggaattttttattatatgaatatatgagtatggaattattgtaagaaattggtgtttttgtttttaaaggatatgtggtaaagtgattagatgaagtttatgtaattgttaaaaaattaggtttaaaagatgttgtgatgaaggtataggttttagttggtggtagaggaaaaggaatatttgaaagtggttttaaaggaggagtgaagatggttttttttttagaagaagtaaaagttgtttttttataaatgattaggaaatagttgtttattaagtaaatgggagaaaagggtagaatatgtaattaggtattggtttgtgagtgaaaatattttaagagagagtgttattttgtaataataatggaaaggttattttaaggttttgtattaataggaagtttatatagtggggttaatattgaagatgttgttgttgagatttttgaagtaataattaaagtatttattgatattgtagaaggtattaaagaggaataagttttttagtttgtatagaagatgggatttttatttaatattgtggttttagtagtagaaaatatgattaagttttatagtttttttttgaaatacgatgtaattatgatagaaataaatttaatggtggaagatttagatggagttgtattgtgtaaggatgtaaagattaattttgattttaatttagtttatcgttaaaagaaaatgtttgatttataggattggatttaggaagatgaaaggaataaagatgttgttaaggtagattttaattatattggtttcgatggaagtataggttgtttagtaaatggtgttggtttggttatggttataatggatataataaaattttatggagagattttagttaatttttttgttggtggtggtgttatagtttattaagtaatagaagtatttaagtttattattttagataaaaaggtattggttattttggttaatatttgtggaggaattatgtattgtgatattatagtaaagggtatagttatggtagtaaaaagtttggaaattaaaatatttgttgtggtatagttataaggtatataagttgatgatgttaaggtattaaaagtagatagtggatttaaaatatttgtttgtgatgatttggtggaagttgttagagtgtttgtaaagttttttgaaatagtgaagtaaagtaagcgtatgtggatgtgaaattttaattgttaatatgatttgaaaatttagtgatggttgaaggtgttaaatgtgttataattattaaggatattgtgttttgtgttattgtttttttaagtgtgtggagattgtagttgttatttaggtatataaatatttaaaagtatttggtttgtatttaattttattatttagaatggattgtttgtaagaagtatgtataatgtaaatattttttttatttcgttatagttagttttttttgtttttataaaatgtaatttgtaatatgatagtttattattgttggatataaagttttttattgataagagatttataaataaaataaatatgaagataaagttttattttttagtgttaatatatagtatatttaataattagttttattagtagattagtatattaaaatattgttttatgtaaaaagtgtttatttttagtattaaatatataataaatgtaataattattatttataaatagagtttttaaatattttttagaaaattaaaatatttttaagtattttgatgaagtaattttgtaattatgtgaatattgttttaattattaggaaacgttgataattgtaagaatttatgattttatggtattaagaagtatttgtaggtttgttttaaatagaggtatattaattaagggaaaaaaatagtaatgttattattgtagttttattatatttattttttaaacgattggtttttaaaagtattatgaaagttttattttagtaaaatttatttaagtatagttgatgtttagtagggattttttagtgtagtataaatatgttttagagaattgttggttggttgtatatgtttttaaaagttgttagttagttatgaggttatagttgaaaattatattttttatgagaaattgtaaatattggttttatgttttatttggattttttattgtattattttttgttaataaaaataaatttttttagtttttttgttttgtattttttagtataattttatttaaaagtataaaaagtgtttgtttttaaattgtattataagtaagtgttaatattttgggtttttttatgtttgtttgtttgtttgttttttgagatggagtttcgttttattgtttaggttggagtgtagtggtgttatttcggtttattgtaagttcggtttttcgggtttacgttatttttttgatttagttttttaagtagttgggattataggcgtttattattacgttcggttaattttttgtatttttagtagagacggggttttatcgttttagtcgggatggtttcgattttttgatttcgtgattcgttcgtttcggttttttaaagtgttgggattataggcgtgagttatcgcgttcggtttgaaggatatttttagagaagtgtaaaatattatggtaggttttaataatagaattaaataattagaagaaagaattttagagttttaagataaggtttttaaattaattttgataaaaataaagaaaaaagaattaaatgaataaagtttttaagaagtttgggattatgttaaatgattaaatttaagaataattgatgtttttgaggaagaagagaaatttgtaagtttgaaaattttatttgagggaataattgaggaaaatttttttggttttgttatagatttggatatttaaatataagaagtttaaagaatatttgggaaatttattttaaaaagattattatttagatatatagttattaggttatttagggttaagatgaaggaaagaattttaagagttgtgaggtaaaggtattaagtaatttgtaaaggaaaatttatcggattaatagtagatttattagtagaaattttataagttagaagggattggggtttaatttttagatatttaaataaaataattattaatttagaattttgtatttagtaaaagtgatgaaggaaaagataaagtatttttttttttttttttttttgggacggagttttgttgttatttaggttggggtgtagtggtataattttagtttattgtaagtttcgttttttgggtttatgttatttttttgttttagttttttaagtaattgggattgtaggcgtttattattacgtttagttaattttttgtatttttagtagagatggggttttattatgttagttaggatgttttttattttttgattttatgattcgtttgttttagttttttaaagtgttaggattataggtatgagttattgtgtttagcggaaagataaagtattttttatataaataaatgttgagagaatttgttattaataagttagtattataagaattattaaaagatgttttaaattttgaattaaaattttgaaatatattaaaatgtgatttgtttaaagtataaattttatagggtttataaaataattatattataaaaaaaaaaaaaaggtatttaggtaataattagtataatgaatagaatagtattttatattttaatattaatatttaatgtaaatggtttaaatgttttatttgaaagatatggaattgtaaaatggataagaattttttaattaagtatttgttgtttttaagagatttatttaatatataaggatatatataaatttaagataaagtgatggaaaaagatgttttatgtaaatgggtattaaaagtaaataggagtagttatttttttattagaaaaaatagattttaaagtaataatagtttaaaaagataaagagggatattatataatgataaaaggattagtttgataggaaaatattataattttaaatatatgtgtatttaatattggagtttttaaatttataaaataattattattagatttaagaaatgagatagatggtaatataataatagtgggggatgttaatattttattgatagtattagataggttattaagatagaaagttaataaagaaataatggatttaaattttattttagaataaatggatttaatagatatttatagaatattttatttaataattgtagaatgtatattttatttattagtatatggaatattttttaagataaattatatgataggttataaaataagttttaataaatttgagaaaattgaaattatgttaggtatttttttagattatagtggaataaaattggaaattaatattaaaaggagtttttaaaattatgtatatacgtggaaattaagtaatttgtttttgaatgattaatggattaataatataattaagatggaaatataaaaattttttgaattggtttgtgtggtggtttaattttgtaatttttatattttgggaggttaaggtgggtggattatttgaggttagggatttgagagtagtttgattgatatggtgaaattttgtttatattaaaaatataaaaattagtttggtgtggtggtgggtatttgtagttttagttatttaggaggttgagataggagaattgttttgtttgaattcgggaggtagagattgtagtgaggcgagatggtgttattgtattttagtttgggtgatagagtaagattttgtttttaaaaaaaaaaaaaaaaaaaattttttgaattgaatgattatagtgatcgaatttattaaaatttttgggatatagaaaaagtagtgttaagaggaaagtttatagtattaaatgtttatattaaaaagtttgaaagagtataaataaataatttagggtcgtatttttaggaattagagaaataagaataaattaaatttaaatgagtagaagaaaaaaaaataatttagatcggagtaaaattaaatgaaattgaaataaaaaattataaaagataaatgaaataaaaagttggttgtttgaaaagataaattaaattgatagataattagtaagattaattaagaaaagaaggaagaagatttaaataagtttaattagaaataaaatagaagatattataattaatattatagaaatataaaagattatttaaggttattatgaatatttttatgtatataaattagaaaatttagaggatatggataaatttttgaaaatatataatttttttagattaaattaggaagaaatggaaattttgaataggttaataataagtagtgagattgaaatggtaatttaggttttatttttttttttttttttttttttttttttttttttttttttttttatagtttttttttttttttttttttacggtttttttttgatgtcgagtcgaagttggattgtattgttgttatttcggtttattgtaatttttttgtttgatttttttgttttagtttgtcgagtgtttgtaattgtaggcgcgcgtcgttacgtttgattagttttcgtatttttttggtggagacggggtttcgttgtgttggtcgggttggtttttagtttttaatcgcgagtgatttgttagtttcggttttttaaggtgttaggattgtagatagagtttcgtttatttagtgtttaatggtgtttaggttggagtgtagtggcgtgatttcggttcgttataatttttattttttagtcgtttgttttggttttttaaagtgttgagattgtagtttttgttcggtcgttattttatttgggaagtgaggagtgtttttgtttggtcgtttatcgtttgggatgtgaggagtttttttgtttggttgtttagtttggaaagtgaggagcgtttttgttcggtcgttattttatttaggaagcgaggagcgttttttttcggtttttatttttatttaggaagtgaggagcgtttttgttcggttgtttatcgtttgagatgtggggagtatttttgtttcgtcgtttcgtttgggatgtgaggagcgtttttgttttgtcgcgatttcgtttgggaggtgaggagcgtttttgttcggtcgtttcgtttgagaagtgaggagattttttgtttggtagtcgtttcgtttgggaagtgaggagcgttttcgttcggtagttattttgtttgggagggaggtgggggttagttttcgttaagttagtcgttttatttaggagggaggtgggggtgttagtttttcgttcggttagtcgtttttttcgggagggaggtgaggggtttttttgtttggtcgtttttaatgggaagtgaggagtttttttgttcggttattatttcgtttgggaggtgtatttaatagtttattgagaacgggttaggatgataatcgcggttttgtggaatagaaagaggggaaaggtggggaaaagattgagaaatcggatggttgtcgtgtttgtgtagaaagaagtagatatgggagattttttattttgttttgtattaagaaaaatttttttgttttgggattttgttgatttgtgattttatttttaattttgtgttttttgaaatatgtgttgtgtttatttagggttaaatggattaagggtggtgtaagatgtgttttgttaaatagatgtttgaaggtagtatgttcgttaagagttattattattttttaattttaagtatttagggatataaatattgcggaaggtcgtagagttttttgtttaggaatattagagatttttgtttatttgtttatttgttgattttttttttattattgttttatgattttgttaaatttttttttgtgagaaatatttaagaatgattaattaaaaaaaaaaaaaaaatggtaatttaaaaaattatcggtcgggcgtagtggtttacgtttgtagttttagtattttgggaggtttaggcgggtagattatttgaggtcgggagtttgagattagtttgattaatatggagaaatttcgttttttttaaaaatataaaaaaattagttaggggtggtggtatatgtttggaattttagttattcgggaggttgaggtaggagaattatttgaatttaggaagtggaggttgtagtgagtagagatcgtgttattgtattttagtttgggcgataagagtgaaattttattttaaagaaaaaaaaaaaggtattaataataaaaaaaagtttagaattagatggatgtatagcggaattttattagatatttaaaaaatggtatttatattattgatattattttaaaaggtagagaaagagggaattttttttaaattattttatgaaattagtattattttaatattaaaattaggagaggatataataaaaaaaaaataaaattataggttaatatatttaatgagtatagatgtaaaaatttttaaaatatattagtggtcgggtgtggtggtttatatttgtaattttagtattttgggaggttaaggtgggttgattatttgaggttaggagtttaagattagtttgattaatatggagaaattttatttttattaaaaatataaaattagttgggcgtagtggtgtatgtttgtagttttagttatttgggaggttgaggtaggagaatcgtttgagtttaagaggcggaggttggggtgagtcgagatttcgttattgtattttagtttgggtaataagagcgaaatttcgtttggaaaaaaaaaaaaatgttagttaatagaatttaatagtatattaaaataataatttattatgattaagtgggttttttattagatatgtaaggatggtttaatatatgaaagttaataaatgtaatatattatataaatagaattaaaaataaaaattatatgattattttaatagatgtagaaaaattattttataaaatttagtatttttttatgattaaaatttttagtagggttgggtatggtggttaacgtttttaattttagtattttggaagattgaggggggtggattacgaggttaggagattaagattatattggttaacgtggtgaaatttcgtttttataaaaaaaatataaaaaattagtcgggcgtggtggtgggcgtttttagttttagttatttgggaggttgaggtaggagaatggcgtgaatttaggaggcgggtgagcggagatcgtgttattgtatttagtttgggttatagagcgagattttattttaaaaaaaaaaaaaaaaaaaatttttagtaaaattagtatagaagggatatattttaaggaaataaaaggtatttatgataaatttagagttaatattatattgaacgggggaaagttgaaattattttcgttgagaattgggataagttaaggatttttatttttattatttttatttaatatagtattggaagttttaattagagtaattagataagagaaagaaataaagtgtatttaaattggttataaggaagttaaattgtcgttgtttgttgatgatatgattgtatatttagaaaattttaaggatttatttaaaagttttttagaatgggtgaataaatttagtagttttacgatataaaattattgtataaaattagtatttttgttatatattaatagttattaagttgagaattaaattaagaatttaattttttttattttagttgtgataaaaataaagtatttaggaatatatttaattaaggaggtgaaagatttttataaggaaaattataaaatattgttgaaagtaattatagatgatatagataaatggaaatatattttatgtttatgaatgggttgaattaatattgtgaaaatgattatattgttaaaaaaaaattataaatttaatgtaatttttattaaaatattattattattttttatagaattagaaaaaataattttaaaatttatatggaataaaaaaagattttgtatagttaaagtaagattaattaaaaagaataaatttggaggtattatattatttaattttaaattatattataaggttgtagttattaaaatagtatggtattggtataaaaataggtttatagattaatggaatagaatagaggatttagaaataaaattaagtatttatagttaatcgaattttaataaagtaaataaaaatataaattggggagaggatatcgtatttaataaatggttttgggttaattggtaggttatatatagaagaatgaaatcggattttttttttttattttatataaaaattaatttaaggtggattaaagatttaaatttaagatatgaaattataaaaattttaaaagataatataaaaaaataattttttagatattgttttaggtaaagattttatgattaggaatttaaaagtaaatgtaataaaaataaagataaatagatgggatttaattagattaaaagtttttgtatagtaaagaaataattagtagggtaaatagataatatatagagtgaaagaaaatttttgatttatatattcgataaaggattaatatttaaaatttataaagaatttaaataaattagaaagaataaaataaataattttattaaaaaacgtattaaggatatgaatagaaaatttttaaaagaaatatataaatagttaataaatatatgaaaaaaatgtttaatattattaatgattagggaaaggtaaattaaaattataatgtaataatattttatttttgtaagaatgattataattaaaatattaaaaaaaaaatagatgttggtatggatgtgacgaaaagggaatatttttatattgttggtgggaatgtaaattagtataataattacggaaaatagtatggagaatttttaaataattaaaagtagatttattgtttgatttattaattttattattggatatttatttagaggaaaagaagttattatataaagaagatgtttgtatatatatgttaataatagtataatttgtaattgtaaaaatatggaattagtttaaatgtttataaattatcgaaaggataaagaaaatgatgtatatgtatatcgtggaatattattgagttataaaaaggaatgaaataatggtattcgtagtaatttggatggaaatggagattattattttaagtgaagtaatttaggaatggaaaattaaatatggtatgtttttatttataaatggtagttaagttatgaggatgtaaaggtataagaatgataaaatggattttgaggatttaggggaagaggggtagggaggtgagagataaaagattatatattgggtattttgtatgttgtttaagtgatgggtgtattaaaattttagaaattaatattgaagaatttatttatgtaattaaatattatttgtttttttaaaaatttattgaaataaaaaaaaataaaaaataaaataattttatttttaaaaaaagaaataaagaagatataaataagggcggagaaatattatgtttaaagattggaatatttagtattgttgaggtattaagttttttataattgatttgtggattaagtgtaattttaattaaaattatggtagggttgaatttaaaagtttaaaaaaataaaaaataaaaataaattttggtaggttttttttaaaaagaaattattaagttgatttgttaatttatatggaaatttgaaggattttgaatatttataataatttttaaaaagaagaaatttggaaaatatatattatttgattataagatttattataaagttttaggaattaaggttgtgttattggtataaggatagttatgaatcggtggaatagaataaagagtagatgaataaaattatatatatatgtttttgaaaaatgttttaaggggaaaggatagtgtttttaataaatggtgttggaaaaaaaaatgataagaaataagaggaatattatatttaaaaatttatttgatataaattatagatataaatataagagttaaagttgttagttttttaaaatagtgttacgtaataggttataatatgagttataaatgtgagttatatcggtaatttttaattttttggtagttatattttaaaaagtaaaaagtaattaatgaaattatttttaataatgttttatttaatttaatatatttaaaatataattttagtatggaattagtataaaagattattggtatatttaatattttttttttatatttagttttttttgaaattattttttagagtttttagggtttagaaattttttaattttatattttgttatgttaagattttttttagtttcggggattttaggatttgtagaagatattagtattatttatatttttaattttgggtttcggaaagaaagagtatagagatatagtcgaggttggtatttattttagttttttttttttttagtttttttttatatattaggtaatttattttgtcggtaagttcggggttttatgaagtgttaggtattggtgggaagtggttaggagataatataaattttgattttcgtaattagttttaggaagtttttttgaaatttatttagttttatttttgtcgtagtttgggtgtttttttcggcggagttatacgtttgtagagggtgattttagaatatttttttttttaataatttagggtttttttttttatttgttttaggatttagttcgtatggtatttttcgggaaattttatttttatgataataattttaaattgtatttggttttttttatttttcgtgttttgttttttttttaattattttttattttcggatatttttgtagttgattttagtgattttttattggttacgttttttaatcgaaggtaaattttttgagagttatgatttgtgtttgtttggatttgatttaagcgtttagaatagcgtttgacgaaaagtagatgtttaattaatagttaggggttgaataaatttagagattagaattttttaaagttgagtttggggttgataggtcggtatttttttaatatatgatttttgaggtttataggggagcggtggggagaggtttatttagggtggtgagcgtagttttagtggtagaaattttcgtgcgtttttttttgtcgtagaggaagatagatttttacggagtttttagggcgtagtttttagggcggagtttcggggcgtttcgggtagggagtttgggttaaagcgttaaaattcgtcgttgtcgtttagttgtagtacgtttcgcgttggggagttttttttggtgggcgatcgttatggataatcgataagattagaaattagatttgagtttagaattaaggatttttaagtagggattggagatggtagggggttaggattaagggatatagatagtaggttttgtttgtttaggttgtaaatgggaagaagaggtcggatgttagggttttggatttttagggttcgggtggggttagaattttggatttttaaggttggggaggggtcgttttttaggatttaatagggtataggtttagatgtttgggttttggaggttcgggtagtggcggaggaatcgttttcgggttttcgatggattggggataaatgtttagtttagtttgattttagaaatttttgtaatttaatatagtttttagtttcgatgttatgtttttttcgggttttaacgtgttggggttggagatttatttaggggatttcggggaggagggatttttttttttggaagtagtagaataaattttagggatttaggagtttaaggttttattttaaaaatattgagaggttgcgtattgggagtatagtatgtttgtggggtttatttagatttgggaattaggttttagggtttgtagatttttttttgttttgaggttagagtttattgttattaattgggaggaaatatttgtcgcgggacggggtcgttcgtatgtgtatagagttttgttttgtcgagattcgaaggggaatttggggaggttttagatggggaagggataggagagttgggtgtttttttttagtttttcggttatacggggtcgttgtcgttttacgtttgggttttgatgagttgttttggagaggacggggcggtggtttgagtaagatatagattgttgatttagaaaggatgtattaatgaggtggggttggggttgtttagggggtggaaaggttttttgagaagttttggattgcgcggggtttcggttttgcggaatagaggagggttttggagttgtttgtttttgaggtttttaatttttttttgtaaattttttttttagtttttttatggtaatattttaggaaaatggaaagttgattattttttttttttattttttaatttttttttgattgttatttttagataattttattttagaagagttttaaatttatataaaagttgtaatggtagtatagagttgttattcgttttatagttagttttttttgatgttaatattttttattattatggtttatttgttatagttaatgaagttatttttatattttattattattaaattgtagattttatttggagtttattagcgtttttttaatgttttttttgtgttttaggattttatggagaatattatattatatttagtttttgtcgtgtttttacggtattttttggtttgtgataatttttgagatttttttaatttttgatgttttttataatatcgggaagtattgattagatatattgtaaaatattttttaaattgaatttagttggggtgtagattatggttagattatggttatggatgtttagatgaggtgaagtgttgttttttaaatatattattaagattatattaatttgatgtattattgttgatgttgaagttgattatttatatttttattttttgtagttgttataaaaatgtttttaaagttggtaatttataataatagaaaattatttttttatagttttggaggtttagggtattggttagcgttttttggtttgtagttttattgttttagtttttgtttttttttttatattgttttttttttttttgatttttttttttgtgtatttgttaggaagatattttttattggatttagggtttatttaggttatttaggaggatttttttattttaatatttttagtttaattatatttgtaaagattttttttttttaaataatttgaaatttatagtttttggggattaggatagaaatatatttttgtggggataattatttaatttattatatttggttaagttaatattttttagagtggtaatttattagtgtattttaggttataatttttattttaatttttaaataaatttaatatatttggatatttttttaatgtttttttttttttaggttgaaaaatttggtattagaagtgattttgaagaaagattatttttggaagagatttatgttgagtttattgtttgattttttgtttttgtttttgaatattttttgagagtaaaatttattttttaaaaagatgggtatgtgtcgattttttaaaagttgtttgggttattgtcgttatttaatgagaaattttagtttttttaaagagaaattatttgttgttaggataaattggtatatgaataaataaaattgttattaggggtcgtattagttttaagaaaaatttggagaaaatggttataggatggataattagattataggttgtttattaagtaaaaataaaaattttatattaggtatattattaaaaaataaatcgttttagtttttattatttttttatagggattatggaattttttttttgttgtcgagaaattaataagaggtagaataggatgttaaaattttaaagtatttaatataggtcgttttttgggatttttgttagttatatggttaaaatttatggtcggtggtttatgtttataattttagtattttgggagattaaggtggaaggattatttgagtttatgagtttgaaattattttgggtaatatagtaagagtttatttttatttttaaaaattaaaataaataaggaaagaaaaaaaaattaaggtttttttttgtgtacgttttgaaattaatgggtagagtacgttaaagttaatttggatttttaatggttatttttggggttttttgagttttttaaatttgttttttttaaaataaaattagaagattatggttttaaaattaaataatgtgaatgggaggtttagtttatttggtattttaaagttttataatgtattcgggatttaaatattgtttttttttaagattttattataaaattaattgagattagtaaatagttaaggaaggataataaggttttagggttttagatttttttttttttagaggagagattttttgtttttttttttttgtttttttgtatttatttttggttgaattatttttttttttaattttttagtttttattatttttgaatttggattgttaaaatttatttttttaatggtcgggtattatagtttacgtttgtaattttagtattttgggaggttgaggtaggtagattacgaggttaggagatcgagattattttggttaatacgatgaaatttcgtttttattaaaaatataaaaaattagtcgggcgtggtggtaggtgtttgtggttttagttatttaggaggttgaggtaggagaatggcgttaattaggaggtggaggtggtagtgagtcgagattacgttattgtattttagtttgggtgatagagcgagatttcgttttaaaaaaaaaaaaaaaagaaaagaaaagaaaagaaaaaagaagaagatatttgaataagtatattgatagtagtataattggtgattgtaaaaatatggaattagtttaaatgtttattaattaatgaatggataaagaaaatgtaattttatatatatttatatttatatatatttatatttatatatagatatatagatatataatggaatattatatagttataaaaagaaaggaaataatggtatttaaagtaatttggatggagttggagattattattttgagtgaattaatttcggaatggaaaattaagtattgtatgtttttatttataaatgggagttaagttatgagaatataaaggtttaagaatgatataatggattttgggaattggcgggggaagggtgggagggagttgagggatataagattatatattgtgtatagtgtatattaattaggtgttggatgcgttaaaattttggaaattattattaaagaatttatttatgtaaataaatattatttgtttttttaaaattattgaaatttaaaaatgttttaaataaataaaatttaaaaggattaaaaatggattatttgtttttaaaaaaaaagaaattattatttgtatagtttttatgtaatgtgaaatatgaatatttataattatatgaaaagttgttaaaaataatttttttagttcgggtatggtagtttatatatgttgttttagttattgggaaggttgaggtgagagaattttttgagtttaggagttttaggttgtagtgagttattatggtgttattgtattttagtttgggtgatagagcgagattttgtttttaaataatagtaataataattttttttttttgagttagacgggtatggagacgtttttggaaggaatatcgtaatggttgcgtagggatagttttaggtttagtttaaatttgtattggttggtgatggtggtattggaaaaacgattttcgtgaaatattatttgattggtgaatttgagaagaagtatgtagttattttgggtgttgaggtttattttttagtgttttatattaatagaggatttgttaagtttaatgtatgggatatagtcggtttggagaaatttagtggattgagagatggttattatatttaagtttagagtattattatagtgtttgatgtaatatcgagagttatttataagaatgtgtttaattggtatagagatttggtatgagtgtgtgaaaatatttttattgtgttgagtggtaataaagtggatattaaggataggaaagtgaaggcgaaatttattgttttttatcgaaagaagaatttttagtattacgatatttttgttaaaagtaattataattttgaaaagttttttttttggtttgttaggaagtttattggagattttaatttggaatttgttgttatgtttgttttcgttttattagaagttgttatggatttagttttggtagtatagtatgagtacgatttagaggttgtttagataattgttttttcggacgaggatgatgatttgtgagaatgaagttggagtttagcgttagaagtttagttttataggtagttgttttgtgatgttagttgtgtagcgtgtgtgttattttattattatttagttaagcggaatatgtgttttatttgtgggatgttgaaggagatgagtgggtttcgtagtgaatgtggtagtttaaaaaatatttttattgtttggatttgtatatttagttgttttggaatatagttgattttttgagttttaaatatagattgttatagttatattataatatttagcggtgaaattttgtttgttattgttatttttattttttttcgtttagaattagaataaagttgtattttaaatatttaaaaataaaaaatttttttttttttaatttaatatttgtgtaaggttagattttttaatatatatattttaattaaagtaagaaaatggttgggatgtagttggaggttataattttaagtgaattaatgtaggaatagaaaattaaatattgtatttttttatttataattgggagttaaatattgagtatatatagatataaatatgtgtataatagatattgtagacgattagagtggagagggtggggacgtgggttgaaaaattatttgtgggtattatgtttattatttgagtgataggatttatattttaaattttagtattagataatatatttatgtaataaatcggtatatgtaatttttgtatttatttttttttggttttttttttttttttttgagataattttatttttgttgtttaggttggagcgtaatggcgtgatttcggtttatcgtaatttttgtttttcgggtttaagcgatttttttgttttagttttttgagtaggtgggattataggtatgcgttattatttttagttaattttgtatttttagtagatatggggtttttttatattgataaggttggtttcgaattttcgattgggattataggcgtgagttatcgcgtttggttattttttgtatttaaaataaaagttaaaaatttaaaaataagtatataagagaatgtatgttatgagttaagaatgatgtttgtaaaattttgtaagaataatatttatgaaaatgaaaaataattattttttttgttattaaaaattttggtagttgtagaaggtgggatttttttttattgggagtcgtagagttaatatatgaaattaaaagtgagttttaagtagagtaagttttattttttgtataggatttgtaaagaggagagtagttttgttaagttaatttttttattagtgaggcggttagtgaggggtgagggggttaaaatgtaggattgttttaatgaaggggttgggtattaaaagtgagggggaggaatatttatatgttttatgggaataggtagtgaatttttttaaattggtaatatcgttttttttttggtttttttaggattttttttatttatcgttatggagatcgttaattgttatggtatggatgggagcgtaatttagtttggaaacgggattataatgaagtatgaggtttttttgaagttatttggtcggtttttttggttgtaacgagttttagttggtttgattataaaggtaattttttgaagtagattttgtttttttgtttttgtttttgttttttgttttttgttttttttttttagatattttattttgtcgtttaggttggagtgtagtggtgtgatttcggtttattgtaattattatttttcgggtttaagtaatttttttattttagtttttagagttgttggaattataggcgcgtattattatattcggttaatttttgtattgttagtagagatagggttttattatgttggttaggttagttttgaatttttgatttcgtgatttgtttgtttcggtttattaaaatgttgcgattataggcgtgagttatcgttttcggtttatacgttgtttattttggaaaaattaaaaattaagtttttttttattaaagatatgttattttcgattaagagattaagattattttggttaatatggtgaaatttcgtttttattaaaaatataaaaattagttgggtgtggtggtatacgtttgtagttttagttattggggaggttgaggtaggagaatcgtttgaattcgggagaaggaggttgtagtgagtcgagattatgttattgtattttagtttggggatagagtaagattttgatttaaaaaaaaaaaaagttgtttttattaatatgtaatgggttattaatatttttttaaatgaattaatatttttaatattttgttttaatattttttaatttatatatgataaaaattgatataatttatagaaataaaatttatttgggtttttattaatttttttttttttgttgtttaggttggagggtaatggtacgattttggtttatcgtaattttttttttttgggtttaagtgatttttttgttttagttttttaagtagttaggattatagttatgcgttattacgtcggttaattttttggatttttagtagagatagggtttttttatattggtcgggttggtttcgaatttttaattttaggtgattagttcgttttggttttttaaagtgttgagattataggcgtgagttatcgcgtttagttaggattaatttttaagagtgtgtagagatatcgaaatttaaaagtttaagaattgttgattgttgggaaattttgtagtttttcgtttttttcgtaatttggttatgtgtttttttttttggatatttatgacgtagatttagtttttatttttaatgggtgtcgggtttttagagaagttaattagcgtcgttacgattttcgattataaagtttttattcggatttaagaagtttttaggatttagaggttgggattatggtagatggaattttttttttatttttttcggaggttttggtttttatttagatttgggcgggtgagtgcggggtcgggatggaaacggtttttatcgggagtagagaggggtcggttcggcgggggcgaaggattcggggagtcgcgtcgggaggagggtcgggtcgattttagttttttttcgtttttaggtttttattttttgaagtatttttatattttcgtgtttcggttcggtcgcggggagtttcgttttatttttgtgggttacgtggacgatatttagttcgtgcgtttcgataacgacgtcgcgagttcgaggatggtgtcgcgggcgtcgtggatggagtaggaggggttagagtattgggatcgggagatacggagcgttagggatatcgtatagatttttcgagtgaatttgcggacgttgcgcggttattataattagagcgaggtcggtgagtgatttcggttaggggagtaggttacgatttttttttattttttacggacggcgcgggttttttcgaattttcgggttttagatttattttaaggttgcggaattcgtttagattttagatcggggagagttttaggcgtttttattcggtttttttttagtttaggttaaaatgtttatagggtggtggcgacgggggcggggtttggtgggcgggattgattaaggggcggggttagggttttatattttgtagtggatgtatggttgcgagttggggttcgataggcgtttttttcgcgggtatgaatagttcgtttacgacggtaaggattattttattttgaatgaggatttgcgtttttggatcgcggtggatacggcggtttagattttcgagtaaaagttaaatgatgtttttgaggcggagtattagagagtttatttggaagatatatgcgtggagtggttttataaatatttggagaaggggaaggagacgttgttttatttgggtaagagggtttatagggttatttttttattttttttttgggttaggattgtgtttatagttgatagattttaaatagtagaagaaatagggatggaggttagaatattattttttttttggattaggagagggagttgttatttgaggtataggagattttatattatagagtgatttttttaaagggttagattttttttaggggtaattaaggaatttagtttcgttggagattttattttttagatgaattgatgagtagttttttttgatttttagtattaggaattacgggggagtttttttcgtgtttgatttttagttttatattaagagtttttggaggtttgattttagttttttttagttatttagtatttatataggttaggattagaaatttttttttattttttattttgggttagtttatttcgattttagaattttttaaggaataagaggttattttagatttttaagtttaggttggtgttaaggttttgttttttttttttattataattgttttttttttttttaggatggttatatgggtgttgttggagtgttttatgagagatataaagtgtttgaattttttgatttttttttttagagtttttaaagatatacgtgatttattattttatttttgattatgaggttattttgaggtgttgggttttgggtttttattttgcggagattatattgatttggtagtaggatggggagggttatatttaggatacggagttcgtggagattaggtttgtaggggatggaattttttagaagtgggtagttgtggtggtgttttttggagaggagtagagatatacgtgttatgtgtagtatgaggggttattcgagttcgttattttgagatggagtaaggagggggatgggaggttatgtttttttttagggaaagcgggagtttttttggagttttttcgtagggttagggttgaggtttgggggttagggttttttacgtttttttttttttttagagtcggttttttagtttattatttttatcgtgggtattattgttggtttggttttttttggatttgtggtttttggagttgtggttgttgttgtgatatggaggaagaagagtttaggtggggaagggagaagggtggggtttgagtttttttgttttattgggtgttttaagttttaggtaaaagtgtgttttgtttcgttattgggaagtattatttatatatacgagtttatttagtttggggttttgtgtgttagtatttattttttttttttgagacggagttttggttttgttatttaggttggagtgtaatggcgtggttttagtttattgtaattttcgttttttaggtttaagtaatttttttgttttagtttttttagtagttgggattatatatgcgtgttattatatttggttaatttttttttttgtatttttagtggagatggggttttattatgttggttaggttggtttcgaatttttgattttgtgatttgtttgtttcggttttttaaagtgttgggattatagtcgtgagttatcgtatttagtcgtatttatttttttgtaaagtatttgtgataatgaaggatagatttattattttgacgattgtggtgatggggatttgattttagtagttataggttataggggaaggtttttgttgaagatagattttagaagggtagttgatttaggatttatatttgttttttttacgttttttgattttgttttgggtttgtagttatagtttaggaaatttttttgggatttaaaattaggaggtttttttaggattttatggttttgttttttttttggttttttataggatatttttttttaataggtggaaaaggagggagttattttaaggttgagtgtaagtgcggggcgggagcgtggaggagttcgtttattttataattttttttgtattatattttttgtgggttttgattaggttttgtttttgttttattttagggagcgatagtgtttaggggtttgagttttatagtttgtaaaggtgagattttgggggtttgaagtgggtggagggtggggtagaggggataggattgggttgtggggattttttgatttagaatttttgagtgtgtggtgggttgtttagagtgttattatttatcgtgattgatttgaatttgtttatgattatttttttttgtagtttgagatagttgttttgtgtgcgattgagatgtatagttgttttgtgtgcgattgagatgtaggatttttttacgttttttttatgtgttttaggggattttggtttttttttttgtaagggtttttgaatttgtttgtgtttttgttagtataatgtgaggaggtagagaaatagtttatttttgtgtttattatgatttttttttttatattgatttgtgttttttttttgtttttttttttattaaaaataagaatttgggtagagtgcggtagtttatgtttgtaattttagtatttagggaggtcgaggagggtagattacgaggttaggagatcgaaattattttggttaatacggtgaaatttcgtttttattaaaaaatataaaaaattagttgggcgtagaggtacgggtttgtagttttagttatttaggaggcggaggtaggagaatggcgttaattcgggaggcggaggttgtagtgagttaggattgtgcgattgtattttagtttgggtgatagggtgaaacgttattttaaaaaataaaaattaaaaaataaaaaaagaatttggattttaatttaattttttatatttttgtaatgaaatggatttgaggaagttaagattatagttagaaatatagataattttatagtatatttttagtaaatttagtttatttttattttttagtttattttttattatttgtaattttgattatatattttggagttgaatattgtttttatattgttgtggtttgaatgttttttttaatatttatgttgagatttaatttttaatgtggtaatattgaaaggtggggtttttgagatgtgattggatcgtaaggttgtgtttttatttatgggttaatggattaatgggttattataggaatgggattggtggttttataagaagaggaaaagagaattgagttagtatgtttagtttatagagagtttttattagagtgatgttaagtggaaatgtgaggtgtagttgttatagagggtttttattagggaaatgtttagtgtttagtggatttaggttataggagagagtgttttgtggagcgttgggagtaggatttgattattattaggattttagaattgtggagttagtggtagtatgtagcgtttttttgggaaagttttaggtattagtttgtaatttattcgagtagttacgtaggttgtatttagtaaagttataggtacggggttatttgaggttttgggggtttaatttttgttttagtgtgttcgtgaggtagtatacgaagttaaaagagattattttttttttatagatatttttttttttttatgattttttaatagtatttgttttattttttttatttttttaggttgatttgaggtaaattttgaagtaaaataaaagttgtgtttgagtattatttgtattttatttgtgcgttttgtgttttgttgttttaattttttaattatatttaagttattttttggtttttaatgttatggtttatttagaattgtatttattggttcgtgttttagttttggttatgtcgattttttcgtttttttggtgaatttttgtaattatttgagttttattttgttaggtgatatttagtaagaaggtaatatgtgcggtgagaaagtttagggagttttgggtgtgaatttttattttgttatttttttttgtgtgatacgcggtggggttttatttgtttgagttttagttttttattttgtacgtggtattgtttttttgggagagttattataaagttaatataaagtatttgtattgtggtttgaatgtgttttttaaaaagcgtgtgttggaaattgaatttataatgtaattatatcgggaagtgaattttaatggttggttggttatggaggttttaattttatgaatggattaatattgattataaaagggtttgaggttgaggtaagtttaattttttgtttttatttatttatttgtttttattaagagatgatatagtaaaaagatttattaaatgtcgggattttgatattagattttttattttttagaattatgaaataggttgttttgttttataaattatttagtttgcgtattatattatagtaatataagatgggtaatttgatatttaggttttagttagtggtagatatttttattttaagtatttttattggagtattagtttttttataagtttagaatttttgtattttagtaataataaataagtttttttttttttttttttttttgagattgagttttatttttgttatttaggttagagtgtaatggtatgattttggtttattgtaaatttggttttttaggtttaagtgatttttttgttttagttttttaagtagttgggattataggcgtttgttattacgtttagttaatttttgtatttttagtagagatagagttttattatgttggttagttggtttcgaatttttgattttaggtgatttatttattttggttttttaaagtgttgggattataggtatgagttattacgttttattagaagttttaattaatgtaaagaaaattaatttatagatttgatggaaatttggatttttatattttattttttattttatttttatatattattttttattagtgttttagaaagatgaattattttttttttttatttggtttgtttatttttattttttgttatatcggtaggttatgtttgttttattttaaagatttgttttttttagttttagattttaaatttttttaagttagattttaagggatttttaataaatatttatcgaattttttttgtgtttaaagaatgttgtgaggtttagggtgggattagggggcgagaaaggtttttgcgttgaaggaatttaagatttagtaataatgaataaatagatttgaagataattattgtggttagcgttgaaagaaacgtataaaatgttaaaagttaaggaggaaattatgttttttaggatagtggtttttaatatttttggtattagggatcggttttatggaagataatttttcggaggggtggttttgggatgatttaagcgcgttatttgtattgtggattttatttttattattatattataatatataatgaaataattatataatttattataatgtagagttagtaggagttttgagtttgtttttttgtaattagatagttttatttgagggtgatgggagatattgataggttattaggtattagatttttataggagcgagtaatttagatttttcgtatgtatagtttataataagatttatatttttatgagaatttaattttattgttgatttgataggaggtagagtttaggcgttaatgtttggttatttgttatttattttttgttgtgtagtttagtttttaataggttatggatcggtattagtttatggtttagggtttgggaatttttgttttaggagatttaggtttttttaaaggaaaaaatgtttgagttatgttttgaaaaatgtaagatattattgtagatgttttaattagggaattgggttattattaaaaaaaaatgttggaagatgaaagagtaggttttttatgttttttggtttgattttggaataatttagaattagtttagtgaggtatgtattttttatgaggttatataagagttgtgtttttttagatttggattttattattatataggggtttttgggtatttggatattagggaagaggggttaattaggttttatttttttggtatgatatttagtgatttagttaagatattgttgggaaaatagtttatgttatgggatttttttatggtcggaaaagttttgaatagttaaaagtaaaataggatagttaggttgtattatgtagataatggtgatttatgggtaggttttgtttttttgggttattgtatgtgaatagatttttgtgtgattatgggataattttgggtttttttttttatgtgtttgtttttaattggtttaggagagggaatttaagggaaggaggaattcgagtgattttgtttttttttgatattttatttttagttataaggttatgaattatagatttttagaagttagtggttttagaggaaaaaagtatttgttatagtagtagaatgatagggagatagttatttttattattagagttttaatagttttttttagttagttagtttagattaggattttaacgggggttgggatttatttttatatattgtaaatgatgtaattttgtttttatgatgattttaaatatattttgatgaatagtataagaaagtaaatgaagtttgggcgcggtggtttacgtttgtaattttagtattttgggaggttgaggcgggttgattatttgaggttgggagtttaagattagtttgattaatacggagaaattttgtttttattaaaaataaaaaattagttgggcgtggtggcgtatgtttgtaattttagttatttaggaggttgaggtaggagaatcgtttgaatttaggaggttgaggttgtgtagtgagttaagattatattattgtattttagtttgagtaagaagagcgaaattgcgtttcgaaaagaaagaaagagagagagggagggagggaggaaggaaggaaggagagagaaagaaagaaagagagagagaaagaaagaaaggaaagaaggaaagaaggaaagaaaggaagaaaggaagaaagaaagaaaggtaaatgattatttagaggattttgtttggtagttaaaattattttgaaatagagggagggaagaaattatttatgtttttttagtggtaaagagattgggaattattacgttagagttagaaaatatgaggtaatagaagggttgttatatgtagtgaaaatttttaaattcggttttttggagggaatatttggtgattgggttttagaggaaagagatgtttgtttagtttattgtttgtgtgtttaggagagattgtgtttattttgagagattgagagaagattttagtgaggagaagtttttaggttagtcgttagtatagggtattggaggtttttaattagttttaagttttgaatagagtatagtttttagaggtttgtattgtttatatttagtagaggttgtgtgttagttttttttatgtaaattagcgtttttgtagggtatgtaaaggatttttatttatgttttttatgggggaataaatattttatgggatattgaaagattatggaatattgtagaatatgtatttattaaattgtgtttaatttagagtttaaattgtttattggtgttgttttaattagtatacgtgattttttttttttttttttttttagtatttattgattatttttgagtgtttttcggagagggggatttagtagggttataggataatagtggagggaaggttagtagataaatatgtgaataaaggtttttggtttttttaggtagaggattttgcggttttttgtagtgtttgtgtttttgggtatttgagattagggagcggtgatgatttttaatgaggatgttgtttttaagtatttgtttaataaagtatattttgtatcgtttttaatttatttaattttgagtggatatagtatatgttttagagagtacggggttgggggtaaggttatagattaatagtattttaaggtagaagaattttttttagtatagaataaaatggagttttttatgtttatttttttttatatagatatagtaataatttgattttttttttttttttttatattttttttttttttattcgataaaatcgttatcgttattatggttcgtttttaatgagttgttgggtatattttttagacggggtggcggtcgggtagaggggttttttattttttagattggtcgggtagaggcgttttttatttttcgaacggggcggttggtagggcgggggttgttttttattttttggacggggcggttgtcgggtagagacgttttttattttttagacggggcggttgtcgggcggaggggttttttattttttagatagggcggttcggtagagacgttttttattttttagacggggtggcggtcgggtatagatattttttagtttttagacggggtcgtcgtcggatagaggcgtttcgtatattttagacggggcggcggggtagaggcgttttttatattttagacgatgggcggtcgggtagagacgttttttattttttagatggggtggtggtcgggtagaggttgtaatttcggtattttgggaggttaaggtaggcggttaggaggtggaggttgtagcgagtcgagattacgttattgtattttagtttgggtaagattgagtattgagtgagcgagatttcgtttgtaatttcggtatttcgggaggtcgaggtgggtagattattcgcggttaggagttggagattagttttgttaatacggggaaattttatttttattaaaaaatataaaaataaaaaaaaataaaaaaaaaaattaagtgattttttttgtagaggatattttggtttttggtattttattatagatttggtatgagattttggttgagtattttttttttttttttttttttttttgagatagagtttcgtttttgttttttaggttggagtgtagtggtatgattttggtttattgtaattttcgttttttggatttaagcgatttttttgttttagtttacggagtagttgggattataggtatgtgttattacgttttggttgattttgtatttttagtaaagacggggtttttttatgttggttaggttggtttcgaattttcgattttaggtgatttatatattttggttttttaaagtgttgggattataggcgtgagttaacgtatttagtttggttgagtatttttaagttttatttttaatatttgttagttaagttgggataataattatttgattgattgtacggaattttgaatgaattgaattggataatatatgtaaatttttgtggtgggaatttgggtgttattttttttgtattatgaaaatttaggttaatttttttttttttttttaattgtttttattgtatatttataaaaataagaaaagaatttttttgttttttttttttttgagatatagtttcgtattgtcgtttaggttggagtgtaatggtataatttttgtttattgtaaattttgttttttgggtttatgttatttttttgttttagttttttgagtagttgggattataggtgtatgttattacgtttagaaaattttttgtatttttagtagagataaggttttatcgtgttagttaggatggttttaattttttgtttttatgatttgtttattttcggtttttaaagtgttgggattatagttatgagttatcgcgtttggttaagaattttttaataaataagaaaaattttatttgtaattttattatttggtataataattatatttatttttttttatttttttttagtgtgagtaaggataatttagttttgggaatttataaagaaattattttaattaaaagtataggaagttttattagttttatgaggtttttgttatttttaagtagttttatatgagaaattaagagtagcgatgtttgttttgaggaattggagggaaaattaaaatgaaagttgaatttggataagagaaaaattaagggtatttattttttttaattttagtttgtttgattttttttttattattttttttattatttttaggtagggtggagatagtattagggggagattttgggagatagggtattattgtaagaatagtaggatagttttattggtggttgtgggatgtttcgtggttttgtttattgttgttttggaggatgtatcgtttcgtttttttttttggtgttagagttaggtgattttgtttaaagagtaggttttttttttttatagaggtaaataggaaacgtttttttttttaattagttttgtttagtgtttggaattttattgagttagtttcgtagtaagttagtagtttaggaaatttattttttttgagtttttttgtagtttaagttgtttagggaatttgatatttttaagatatttgtttatatatgggtagtttagtcgtcgagttagtggtggtaattaaagcgaatagaggatttggttttttgaaaatagaggtaaagaagtatagttatttaattttttgagttttgtttttatatggagatgtttatatggataaatagggtttggataaggggaagggttaatatgagaaagttatatgatttttgttatgttatttttttgtgcgtttattttttttgtttttaaatattttagttaaaagataataaatattgtaatttttatatttttttagttttgtttttatttgttttgggtgttttgattgttatttttatttatttatattaaatattatttaattaatatttattataagtaaattatatgtgagattaagagtattatttaaaatagttgatagttggtatggtaatggaaattaatatataaataaaatttttttaattatgttatttttttgttttaattaaatgattataaaattatttattaagtgatatagttgaaatataaataattttttaaatagttataataatttttaaattatttattgatttttaaatattttttgtattttttaggtggtaattattggttaagtgatatatgtttatgttagttatgatttgataaaagagttttgtataagtttttgataatttttttattaaattgtttgtatattatgacgtatgtaattaattatattgtttatggtgttaaatttttttttattttagtagttatgttaaagattttttagtttttgaattgttgtttgaaatttttttttttttttttttttttttttttttttgagatagttttattttgtcgtttaggttggagtgtagtggtgcgattttggtttattgtaatttttattttttcggtttaagtaatttttttgttttagtttttcgagtagttgggattgtaggtatatgttattacgtttagttattttttgtatttttagtaaagagggggttttattacgtaggttaagttggttttaaatttttgattttaaatgatttatttgtttcggttttttaaagtgttgggattataggtatgagttattacgtttggtttagaaattttttttttttttttgagacggagttttttgtcgtttaggttggagtgcggtggcgcgattttagtttattgtaagttttttttttcgggtttacgttatttttttgttttagttttttgagtagttgggattataggcgtttgttattatgtttggtttattttttgtatttttagtagagacggggttttattatgttagttaggatggtttcgattttttaattttgtgatttgttcgtttcggttttttaaagtgttgggattataggtatgagttatcgcgttcggtttagaaatttttattatttaatattttcgtttattttattataaaaattaattaataaaagttatttttaataagtaggtttaattgtattgattaaattaaaaattgttttgatttaataggttatatttatgaagttttgtaaatattttttatggttgatttaatttaaaaattttaagtttttaatatattttatttttgttattaaattataattgtaattatataaattattagataatttaattgatttttttttttgaagttgatattttttttttaaatggtatattatatttttaaataatattatttatttttttttttttgttttatgtatttaattttatatattaattgatttttatttttttataattaatttagtttttgtaatttttaatattttttttggaaaggataaagataatattgatatttttgttaatatataagttattaacgttaaatttttgggaaaaaaagtttatgttttaaatatttattatttttattttataatttttattaaagtgaatataaaaggtttggtataattttttaatgtttttggtattttattattatagagtgtttaaatatgttttttagttttatgattttaattttagtatttttagaaatatttttaatttttttaaatgtttattttatatgtagttgtgaatataaagtttagtgaggtaaatatttgaagtaattttttatttaaatattttattgtattattttgatattattgaatatagtaatttatatagtattaatttaaaatataaagagatttttttttttttttttttgagatagattgtcgttttgttattaggttggagtgtagtggtataatttttgtttattgtaaattttgttttttaggtttaagcgatttttttgttttagttttttaagtagttaggattataggtatatgttattatatttagttaatttttgtattttttgtagagatagggttttattatgttggttaggatggttttaattttttgatttcgtgatttgtttgttttggttttttaaagtgttgggattataggtatgagttattgtgtttggttatatagagatttttttaaaattttggtttttttgaattttttttgtgatatatattagaattatttgtagtattgtgtaattattttatattaaaattattttttttgagtattgatgagtaagtaagtttgatatattattttagttttttagatgagtaaaaattattagttttatattattagttttataagtttgaaatttagtatttaagttattaataaaaatacgtttttgtggtcgggcgtggtggtttatatttgtaattttagtattttgagaggttaaggtgtgcggattacgaggttaggagattaagattattttggttaatatagtgaaatttcgtttttattaaaaatataaaaaattagtcgggtatggtggtaggcgtttgtagttttagttgttcgggaggttgaggtaggagaatggtgtgaatttgggaggtggagtttgtagtgaatcgagatcgcgttattgtattttagtttaggtgatagagtgagatttcgttttaaaaaaaaaaaatttttttttgttatataattgaagtttttttggtgatgattgattgtttagatttataaatttattaaaaagttgttttattatggtagatatacgttttgtgattattgtaattattaatgtagattgtaatgatatgtattatttataattttttttaagattttatttagtagtagattaattatatagtaggtaatattagtattttaatggtatttttttaatgttttgttttttttatgatataaagtattttaggggatttattattttaaagattttattatgtgaagtttatttataatattttttaaattttttttattattagtttttttttgaattttgagtatcgataatatgttagaatatttatttttttatatatttataagatgtgtgttttgtatatcgtttttatttaatatttatattttaagtaataattagttatttgtgagttttgttaaaattattaggggttttttgtttgtttgttttttgatatggagttttgtttttgttgtttaggttggagtgtaatggcgttattttagtttattgtaatttttattttttgggtttaaatgattattttgttttagtttttttagtagttaggattataggtatgtattattatatttggttaattttatatttttagtagagatagggtttttttatgttggttaggttggtttcgaatttttaattttaggtgatttatttattttgagtttttaaagtgttgggattataggtatgagttaatatatttggttaattattaggtttttaattaaattttagaaatgtgaattattgttttttttgaattgaattttatgtaatattgaaagtatttttatttgttataatttttgtatattagttgttttaggttgtgatttaatattaatattattggttttatgatttgttttagatttagaagagttatgtttatagtatttaaaagtaatgtttaaaatgtatgtaggtttggtattgtggtttatgtttgtaattttagtattttgggaggttgaagttgatggattatttgaggttaggagtttgaaattagtttggttaatatgacgaaattttatttttattaaaaatataaaaatcggttgggcgcggtggtttatgtttgtaattttagtattttgggaggttaaggtaggtggtttatttgaagttaggagtttaagattagtttgattaatatcgtgaaatttcgtttttattaaaatataaaaaattagttaggtatggtggtatatgtttgtagttttagttatttgggaggttgaggtaggagaattgtttgaattcgggaggtagaggttgtagtgagttgagatttcgttattgtattttagtttgggtaataaaagtgaaattttgttttaaaaaaaaaaaaaaaaaaatttttttgttttaaaaaaaaaaaaaataaaaatttttttgttttaaaaaaaataaaataaaataaaaatataaaaatttggtgggtgtggtggtatatatttgtagttttagttatttaggagattgaggtaggaagatcgtttgaatttgggagatagaagttgtagtgagtcgagattatattattgtattttagtttgggtaatagagtaagatttttattttagaaaataagtaaatagataaataaataaaatgtatttaaattttgttattttatttttattgtttattattttaagtttttgaatttatagatattaaaatattgtatagttattatttttagatgaataataatataataataatagaaataaggaaaagttaaataaatatattatttataagttatagtatgtgaggataataattaattgatgatttttttaaattataaaataatgaatgtataatggtgatatggttgaattagtcggtggtgttataaatgatttttagatgttgtagtgtaggagatttatttattgatgattattgtgatagattaagataaatagttaattagttaatgagatattagaatttttagtatttattaattttattatttattacgataattattttattttttgtaataattagtattggttgtattagtgtatattggttggatgttagtgtgtaagataatgttataaagggttatatgagtattagttattatgttatgatttttaatattgagttgattaggtttaagggttaggtggggtatttttagaaattatagtaatagaggtttttaggaggtaggatttttttttttttttggagatagagttttacgttgttatttaggttggagtgtaatggcgggatatcggtttattgtaattttcgttttttaagtttaagtaatttttttattttagttttttgagtagtagggattataggtatttgttattacgtttggttaatttttgtatttttatttttatttttgttttgagatggagttttatttttgttgtttaggttggagtgtaatagcgtaattttggtttatcgtaatttttattttcgaggtttaagtaatttttgttttagttttttaggtagttgggattatagggatgtgttattatatttcgttaattttgtatttttagtagagacgggttttttttttttttttttttttttttttgggatggagtttggttttgtcgtttaggttggagtgtagtggtataatttcgtgaggatggtttattgtaaattttattattcgggtttaagggatttttttgttttagttttttaagtagttgagattataggcgtttgttattgtgtttggttaatttttatatttttgatagagacggggttttattatgttggttaggttggttttaaatttttgattttaggtgattagtttattttggttttttaaagggttgggattataggcgtgagttatcgtgttcggttaaggtagggtttttttatgttggttagttcggttttgaattttcgattttaggtgatttatttatttcggttttttaaagtgttgggattataggtgtgagttattgcgttcggtttaatttttgtatttttagtagagtagagttgtgattatgttattgtattttagtttgggtgatagagtgagatgagattttgttttttaaaaaaaaaaaaatggttaggcgttatggtttatgtttgtaattttaatattttgggaggttgaggtaggtggattatttgaggttaggagtttgagattagtttggttaatatagtgaaattttgtttttattaaaaatataaaatttgtcgggcgtggtagagggcgttagtaattttaattatttgggaggatgaggtaggagaatcgtttgaagttaggaggcggaggttgtagtgagttaagatttttttattgtattttagtttgggtaatagagtaagatttcgttttaaaaaaaaagaaagaaagaaaagaaaagaaaaggaaatatgtagtttatttaggaaagaatgtatgagtttgtttataaagtataatagtgggcgtgggtaattaatgaagattgttcgggatatttattaagtataaatttttgcgaaaatatataagattataggtattagattttataataaagtgtgtgtgtgtgtcgatatgtatgtgtgtgtgtgtgtacgtatatgtatgtgtgtggggggtgtgtttgtgtgtttgtgtgtatatgggtgtgtatgtgtgttggtgtggagaaaatttgattaataatgtttaagttatattttaagattttttttatttaggttggggttttaggagtagatggtgggtaaagggtaggaataatttgtgttttaagttgtaaataggatttataaaatagttaaaagatagtgttcggggtgtaattaaatttatgaggtaaagaggagagattgggagaggattgagaggaaaattaggtgtgaggttgttatgtaaagtaggttttttggggttattatttgttgtttattagggtttaggataaaagttagaatatcgtatgttatgggttaagaaataggtttttgagggaatttttaatttagtgttagtaagtaaagagaaagtatgagtttaattttttttatttttttatagaagagtaaattaggtatattattggatatgtaggtggaggggagggatgcggtagtgtgttattgttttttattatgagttaagtatgagagtagttttattaatgaagaggtatataaatagcgtaggtatttagtatttttgattagagtgttagttattgataggttgtgttaatttgatttttaagatggtttttaatgattttttattttagtattcgagtttttgtggaattttttttattttgagtttggtatggattttgttatttaattttaattaatggaatatgataaaggtgaaagtttattatatttatgagtagataataagagtttgtggtttttattttgttagtagatttatttattgatttaagtaattaagttgttatgttaaggaggtttatgtggtgaggaattgagagtgtttttaatttaatatttaagaggaattaaatttttagttttattatttttcgtgttttttattaataattaagttagtgagtttggaagtttatttttttttagttgagtttttagggaagattttaattatgattgtagttttgaggggttttgaagagaggatttagttatgttgtattgaattgttgttttttaaatattgtgagataataagggtgtgttgttttaagttatttattttaggataatttttatgttgtaatgataattaatatataggagatgtttaaaaatataagttatttaggaattggagatttaggggtttatggttagttatacgtttttttgttaggagtgagaaaaatatttttggttttattggattttaatttttggaaattttatttattggaagaagagggagttttaggttttaatgagtttgttttttaggtaatttagaatgattttttagtattatttttagatagtgtggtttttgatattataaatatagtagaataatattaaattgagtaaataggatagtaggttgtagatttttttatgtgttaatgatttttataaagatttaaaattttattatgtatagagttgataaaggtattaaatgaattagagaaaggagatttaagttaagaaaatgtattttaattaggaaatgtttttgtgattataaaggggaggaattaggaagttgtggtaaattgtagcggaagttaaagttaaaaaaaaaaatgagagagaattagtgaatttaaaaatatttaatagatataatgataaaaagtaataagtatatttttttggattatgagaaagaagattaggaacgaaagatttagttgggtttttttttattttttttagttttggttttttgattagtgttttaggtttttttagggtttgatatttaatttttttttgggaattaattatggtaatgtattacgaggtattgttttttagattaaacgtggttttttgtttgtttgtttgttttttagataggtttttattttgttatttaggttggagtgtagtggtataattttagtttattgtaatttttgtttttttagttaaagtaatttttttatttattttagtttttttagtagttgggattataggtgtacgttattatgttttgttttatttttattattattattattattattatttgtatttttggtagagacgaggttttattatgttggttaggttggttttaaatttttgggtttaagtggtttgtttattttagatttttaaagtgttgggattataggtatgagttattgtgtttagcgtaaacgtggttttttatgtttttaaattttttttgaaaatatttttttgtgattaaaaaagatttttgggtgtatagagaataggttttgttataattgtaattaatgtgagtttttattaaaaatttaagatataaatatatttataattttatttttttagtgatttattttaatattttttgaggttttttgtgaaatgtttaagtattttatagttaaagggtatattcgtagttttttttagtgttaagaatagaaaagaagttgttgtttttttttgttataggtgttgttgttgaaaatttattttatataattgatggagataatttttattgttttagttatttaaataggttttgttgatttatatttttgtttagattattaggattttttaagggagggatgattgttgaagttgagtgatggaaatattttgttattttttttaattttttataaattttaagtttttaataataaaaagttaaaaattaaaaattaaaagaatttgataggttagatatggtggtttacgtttgtaatattagtattttgggaggttgaggtaggaggatcgtttgaggttaggatttcgaggttagtttgggtaatatagtgagatattatttttatataaaaaaaatttaaattgaaaataaaacggtatttcggttttttggagaaacggtcgattttaggattggggtattttatgatgttagaaagtatttatatgttcgattaaaaggtgagaattatattaaagggatataggagttaattggaaataattttaatagttaaaatggaaataatttgagtaataaaataagtaataatggaattggattataatttatagaataaaataagtatttattagtttatattgataaaagaaatttttaaataaataaatgggaagatgtggtagtatttttttatagaagaatttattagtaaagtttaacggtgtggttagtttgcgttatgataatggttgggagaagtagtaaaatagtagattagttagaaatttaaaagggaaattaaaggaataaaatagataaagaatgttttagtaaaatattatttaattttggtagtttaaaaagttatgtgtagtatatagggttataattgtttagaagagagatttgagaaggttataggaagttatttttttttgtaattaaatatgaggttttagaaataaagagaaagttatggtttatttgtaaattttttgaattttgaaagtattttttaaattatatatagttttaatagtagggttagaagttttattggtttaaggtatttaagtataaattttaatagattattggttgattattaagttatgttgatttaggggtaatttttaagaatttaggtttaaaaataaatataagaattaaaaaaggacgggaggttgaggtaggagaatcgtttgaatttaggaggtagaggttgtagtgagtcgagattacgtcgttgtattttagtttgggtaataagagtgaagttttgttttaaaaataaaaaggaatttgagtagaaatatttgagtagaaatatttgaagttttatattgtatattgtaagggaaaaggattttattgaattagtataggtaagttattataaaaatatttgaatttttatattgtaagggaaagggattttatagaattagtataggtaagttattataaaaataaataaaataataattatttttatttttaagagaaagaaattggaatttagagttagtatatattgtttaaaatttttagttttttaaaaaagttataaaagggtaaagaaataggaaaatgtaatttatttgtagggagaaatagttaatagaaattgtcggttaggtacggtggtttatgtttgtaatttttgtattttgggaggttgaggtgtgtggattatttgaggttaggagttcgagattagtttggttaatatggtgaaatttgttttaataaaaatataaaaattagttgggtatggtgatgtatatttgtaattttagttattcgggaggttgaggtaggagaattgtttgaattacggagttagaggttgtaatgagttaatattatgttattatattttagttttggaaatggagtgagattttgttttaaaaaaaaaaaaaaaattgatttatatttaaatattaatatattatattgaaattattattagttaaaaatagaaatgatattttaaaagtaatgagaaaaaatttattttatataaatatatttatatatatagatataataattttaatagttaattttattagtaataatggaggttagaaggttgtaatatgggttgggtgtcgtggtttatgtttataattttagtattttgggaggttgaggtaggtagattacgaggttaagagtttaagattagtttggttaatatggtgaaattttatttttattaagaatataaaaattagttgggtgtggtggtatatgtttgtaattttagttattcgggaggttgaggtaggagaattgtttgaattcgggaggcggaggttgtagtgagttaagattgtgttattgtattttagtttgggtaatagagtaagattttgttttaaaaaaaaaaaaaattaaagaagatagtaatatatgtaaatttgggggttagtggggagaagttagtaattaagaattttatattaagaaaaattattttttaaaattgaagatcggtatagggatagtggtttgtatttataattttagtattttgggaggttaaggtgggaggatcgtttgaatttaggagtttaagattagtttgggtaataaagtaagattttgtttttgtaaaaaaaaaaaaaaaaaaaatttagttatgtgtggtagtgtatatttgtagttttagttatttaggaggttgaggtaggaggtttttttaggttcgagagattgaggttgtaatgagatatgattatgttattatatttcggtttgggtaatagagcgagattttgtttttaaaattaaaatttattttaaagaaaataaaaagagaagttaatatgaatatatttttagataaataaagattagggagatttattttttgtagatatgttttataagaaatattaatgtaatattaaagtaagttttttagattgagaagaaatgatattagataataattttaatttaatgaaaaataattattgtatgttaattaaagataaaatttgtagttaggtatagtggcgtatatttgtaattttagttatttgggaggttgaggtataagaattatttgaatttagtaggtggagtttgtagtgagttaagattatattattgtagtttagtttgggtaatagagtaagattttattttaaaaatattatattaaaaaaagtaaaatttgtaaaagaaataaatagtattagaaaaaataatatgttggtaattattttttaaaaattaaaaattaaaaattataaatttttttttttttttttttttttttgagagataaggttttatttttttatttaggatggagtgtagtggtttgattatcgtttattgtagttttaaattttggatttaagtgatttttttattttagtttttttttgagtagttgggattatagatgtatatcgttatgtttggtttttttttattttttaattgttttaaaagaaattatataaaataataattataaaattatagtgttgggtttgtaatatttaaagataatgtgtgtgtatatatgtatttatatatatatgataataatggtataaaggatagggaaaagatggagttatattgaaataaaggaattatattagattgtaagtttaatttataagaataaattattagaaatattaaataagttttatacgaaaaattttaagtgtattttattaatttttttttttaattttttaaaagacgtagaatttggttgggtatagtggttgacgtttgtatttttagtattttgggaggtcgaggtgggtggattatttgagtttaggagttttagattagtttgggaaatagggtaaaatttcgtttttattaaaaatataaaaattagttgggtatggttgtgtttatttgaaattttagttatttaggaggttgagttgggaggattttttgagtttagaaagtagacgttgtagtgagtcgagattatgttattttattttagtttggagtatatttttatatttttttaggtttagtttgaattgaataggggatatttgtgaaaggaaaataaattttggggttcgaaaattattaagttaaagggaaaagttaagttgggaattgttgagagtaaatttacgttttattttattcggttatttttttgtttattgagataaatgttatttgattgttttttttggagaggttaattagaaatttaaaagaggtcgggtatagtggtttatatttgtaattttagtattttgggaggtcgaggcgggtggattattcgaggttaggagttcgagattagtttggttaatatggtgaaatttcgtttttattaaaaatataaaaattagtttagcgtggtggtatatgtttgtaattttagttattcgggaggttgaggaatgagaatcgtttgaatttgggaggtggaggttgtaataagttaagatcgtattattgtattttagtttgtgtaataggagcgagtttttattttaaaaaaaaagaaatttaaaagaaagtaattatttgttttttatttatttatgatttggaagttttttcgttatttggagttgttttattattgttttaagttgtttcgtttttttagatcgaattaatgttaattttatatatgttgattgatgttttatgtttttttaaaatgtataaaattaagttgtgttttgataatttgggtatatgttattaggattttttaaggttgtgttatcgatatatatttttaattttgataatataaattttttaaattaattgagatttgttttagatatttagggtttatatttttttggattttttgattttttttagggtattggttatttttttgtttgtttttggatatttttttttagaagtttttgaaatttttgaggtaggaaggattaatttttagttttgaattttgtataaagtgggttttttttaaatggaaatacggttattttttaaaggaaggttaggaattttgttttgtgtgattttagtcgtagttttttatagagggttttattttatttgtttttttttttgtttttttttttattcgtttttttatagagtaagataaaagaagtcggtaaggatggttttggttagggtttgtttttagttatttaaatgggattgtaaagaggaggatagggatggaaaggggaaagtttgatttggtttggtttgtttagtttttttattggtattatttttttattttaattttattatttttttcgatttttattaatttattgtaggtatatgagttttaaaatttgggaaaggtttttttttttaggggttttggttttatagatttgtttaggggggtaaatttttagtggtttagtggtacgtgttttacgtttttatcggtagtttagatagatagatagatagatagatagatagatagatagatgatagatagatatatagtttttttttttttttttttttttttgagacggagtttcgtttttgtcgttgtttaggttatagtgtaatggcgttatttcggtttatcgtaattttcgttttttaggtttaagcgatttttttgttttagtttttcgagtagtttgtattataggtatgcgttattatatttagttaattttgtatttttagtagagagggggtttttttatgttgtttaggttggtttcgaatttttaattttaggtgattcgtttgttttggttttttaagtgttgggattataggggtgagttatcgcgtttagtcgggagtttttattttaaggacgttattgttgtggaggagtaattttatttttaggaattttttttcgtgcgaaaggttgtttgagattaggcgtaataatttttttcgtttaggttatttttagaaaggttatggatttcggatttcgttttagattgtataataattgaggggtgggtttttattttttttttgggatttgtagttaattatttacgaggtaaatagaacgatcgagttttttttagtcgagaattgtggttgttttttcggtgaaaatagaggaagtgggagcggtaggaagcgttttgggattagggcgatttttgaagcgtagaggaattaggttataagtatacgtgaatgtttatattttatagttattaaatgtatttaggtttaaattttatttttttagaaaaaatgtaaataattcgttgagaatatttaatgaaaaatgttggtcgtatttttatttggtttgcggttttgtttttgttttttggataggagattacgtttgtattttgtattataggaggtattttttttttgttttttggtatagatttgtaagtgaattttttgttcgttttcgtttatagcgtaagtcgcgttggaatagtttatttattgttttagatgtatgtggagtaatcgtttttagttttttggttttgagttttcgtgttatttaagtaatgtttttgttgaatttgtttttttttttttttttttgagatagagttttgttttgtcgtttagattggagtgtaatggcgtggtttcggtttattgtagtttttattttttgggtttaagcgagttttttgttttagttttttgagtgtgtaatttatttttttattttatttatttataattttttggttaattttggttattttgtgtttgtgtgtgtatttttagtagatatggggttttattatgttgggtaggttggtttcgaatttttgattttaggtgattcgtttatttcggttttttaaagtgttggaattataggcgtgagttatcgtatttggtttatttatttatttatttatttgtgattgagtttcgttttgttatttaagttggaatgtaatggcgtgatttcggtttattgttatttttacgttttaagtttaagtaatttttttgttttagattttcgagtagttgggattataggtgtgtattattatatttagttaattttttgtatttttagtagagatggggttttattatgttggttaggttggtttcgaatttttgattttaagcgatttatttattttggttttttaaagtgttgggatataggcgtgagttattgtatttggttgaatttttttttttaattggaggttttattttatttttttttatttatttttttgagacgaagttgtatttttgttgtttaggttagagtgtagtggcgcgatttgggtttattgtaatttttgttttttagatgtaagtgatttttttgttttagttttttgagtagttgggaatataagtatttattattatgtttagttaatttttgtatttttagtagagataaggttttgttatgttggttagggtggttttaaatttttgagttcgtgatttgtttattttagttttttaaagtgttgggattataggcgtgagttatcgtgtttggtttttttttttattttttattttattttttgatattagatttgttttgttatttaggttagagtgtagtggtattgagaggtgataatttgttagtagtttttgtttgtttttggcgttttttcggtttcggtgtttgttttggtcgggttcgaggagttttttagtttattgttgtgttgtgggggtttttttttggggttggttgaggtcggagtcgtttttttttgtttggggggaggtgtggagggagagacgttagtgggaataggggttgcgcgtggtgttttcgggttagtggtgtttcgggtgggtgcgggttaggtaggttttgtattgggggtaaggttggcgtcgtttgttgggtttgatgggggggtgggggaggagcgttttttgggttgtcggagtgttttattaggcgcggtaaagttttaggagtgttattgagaggtgaagttagttgggtttttgggtcgggtggggatttggagaatttttgtgtttagttaaaggattgtaaatgtattaattagtattttgtgtttagttaaaggattgtaaacgtattaattagtattttgtgtttaggtaaaggattgtaaacgtattaattagtattttgtgtttagttaaaagtttgtaaatgtattaattattattttgtgtttagttaatttggtggggatttagagaatttttgtgtttagttaaaggattgtaaatttattaattagtattttgtgtttagttaaaggattgtaaatatattaataagtattttgttaaaacggattaattagttttttgtaaaatgaattaattagtttttcgtaaaatggattaattagttttttgtaaaatagaataattagtaggatgtgggtggggtcggatgggggaataaaagtaggttatttaagttagcggcggtaatatgttcgggtttttttttatattgtaaaagttgttttgtttttttgttttttgtagtaaattttagtgttttttattttttgcgtttacgttgtttttatgaattgttaatatttattgtgaaggtttgtagttttattttttaagttagcgagattataaatttattgggagggataaataattttagacgggaggaataaataatttcgggtgtattatttttatgaattgtagtatttattgcgaaggtttgtagttttatttttgaggttagtaagattacgaatttattagaaggaacgaataattttagatatgttatttttaagggttataatatttatcgcggaagtttgtagttttatttttgaagttagtgagattatgaatttattagaaggaagaaattttggatatatttgaatatttgaaggaataaattttggatatattatttttaagaattgtaatatttatcgcgagggtatacggttttatttttgaagttagcgagattaagaatttaataatttcggatatagtatgattttggtttattataatttggattttttagagttaagtaattttttcgttttagttttttaagtagttggaattataggtgtgtgttattatgttttattaatttttgtatttattgtagagacggttttagtatgttgtttaggttggtttttaatttttggatttaagtgattttttttatttaggttttttatagtgttgggattataggaatgagttattacgttcggtttaattggaagttttagagtgtagtggggattacgtgcgtagaggttattgttgttttaattaaaggagataatatgttttataaaatttggaaattgtagagggtgtggggaattatttaaatttagaatattaaaatagaattttattttttgtgtatttgttgttaatttttttttttatatatgtaatgtttgtttgtttgatatgattattatttttgtttttataatatgtttaatattttttttttatttaataaatatggttacgatttgttaagttgttgattatttttttttttttttttcgagatagagttttatttttgttgtttaggttggagtgtagtggtagattttagtttattataatttttgtttgttgggtttaagtgattttttagttttagttttttaagtagttgggattataggtattcgttattatttttggttaatttttgtatttttagtagagatagagttttgttaggttggttaggttggttttaaatttttgatttttagagatttattcgttttagttttttaaagtgttgggataataggcgtgagttattgaatttggtttagattatttttttaagtgtttttttttatttgtaggtttaatattggttttggggtgagaaagaaattaagatttatttagagttataagtttaataagagaatgggtttgtttgggttagttttgggttattggatgagtagggttggtttttttattttttgagttttcgtttttttggtttttatatttttttggagggattttttattttttttggaaattaattttaagtgtatttttttagaaggtatttttgtaatgtttggttggttgtatgcgatttttggttttttttttttatttttttttgtttagttattgtattttttgtttttaaaagaatttttttatatagtacgtgtagagagtagtagcgagttaggttgtttcgcggtgtgtgttcggatttttgtgtgttttggtagtggggttagtgggttgggaagagttgtaggagaaatttagtgggagagaaagattttaatttgggaatttcggggtatttggtagcgttagaatgattttttaaaattttggttggggtagttataggtttttgttcgttacggtggtttttggtaaagaaatatatgtggggtagataagagggatgttcgttaattttttttgaattttgtaattttgtgtgttaaaaataggtatttttggtttttaaagatatttggaaaagatagatttgttgaatatttagaaaggttaagttatagttagaagtttggtgtttgggatttattatttttaaggttttaaaagtattttgttggaataggaatagtttcggtttgtagtttttagtaagattaatatagaagatgggtgatttttgtatttttagttgaggtatttggtttattttattgggattagttggatagtgggtgtagtttatggagggcgagttaaagtagggtagggtatcgttttatttgggaagtgtaaggggttaggggattttttttttttagttaagggaagtcgtgatagattgtatttggaggaatagtatatttttgtttaaatattgggttttttttatggtttttataattgatagattaggagattttttttcgtgtttggttcggtggggtttatgtttatggatttttgtttattgttagtgtagtagttttaagattggtttggtatgttgtagtttgttgggggggtgggagggcgttcgttatttttgaggtttgagtaggtagttttatgtttatagtgtaaataggtcgggaagtttgaattgggtggagtttattgtagtttagtaaggtttattgtttttttagattttatttttgtgggtagggtatgttagaataaaaggtagtagatagttttggtagatttaaacgtttttgtttgatagttttgaagagagtagtggtttttttagtatggtatttgagtttcgaaaatggatagattgtttttttaagtcggtttttgattttcgtgtattttgattgggagatattttttagtaggggttaatagatattttatataggtaggtgtatttttggaataaagtttttagaggaaggattaggtagtaatatttgttgttttgtagttttcgttagtgatatttaggtaaatagggtttggagtggatttttagtaaattttaatagatttgtagttgagggttttgattgttagaaggaaaattaataaatagaaaggaatagtattaatattaataaaaaggatatttatattaaaattttatttgtaggttattaatattaaagattaaaggtagaaaaaattataaagatgggaagaaattagagtagaaaagttgaaaattttaaaaattagattgtttttttttttttaaaggattatagttttttattagtaagggaataaaattggatggagaatgagtttgataagttgatagaagtaggttttagaaggttggtaataaattttttcgagttaaaggaggatgtttaaatttatcgtaaggaagttgaaaattttgaaaaaaggttagataaatggttaattagaataaacggtatagagaagattttaaatgatttgatggagttgaaatttatggtacgagaattatatgatttatgtataagttttagtagttgatttaattaagtggaagaaagggtattagtgattgaagattaatttaatgaaatagagtaagaagataagattagagaaaaaagaatgaaaagaaatgaataaagtttttaagaaatatgggattatgtgaaaagattaaatttatatttgattggtgtatttgaaagtgacggggagaatggaattaagttataaaatattttttaggatgttatttaggagaatttttttaatttagtaaggtaggaaaatatttaaatttaggaaatataaagaatattataaagatattttttaagaagagtaattttaagatatataattgttagatttattaaggatgaaatgaaggaaaaaatgttaagggtagttagagagaaaggtcgggttatttataaaggggagtttattagattaatagtagattttttagtagaaattttataagttagaagagagtgggggttaatatttaatatttttaagaaaagaatttttaaattagaattttatatttagttaaattaagttttataagtgaaggagaaataaaattttttatagataagtaaatgttgagagattttgttattattaggtttgttttataagagtttttgaaggaagtattaattatggaaaggaataattggtattagttattgttattgtaaaaatatgttaaagtgtaaagattattgatattatgaagaaattgtattaattaatgggtaaaataattagttaatattatagtgataggattaaatttatttataataatattaattttaaatgtaaataggttaaatgttttaattgaaaaatagattgataaattggataaaaagttaagatttatcgttgtattgtatttaggagatttattttatgtgtaaagatataaataggtttaaaataaagggatggaggaagatttatcgagtaaatggaaagtaaaaaaaaaattaggggttgtaattttcgtttttgattaaaaaaaaaaaaaaagattttaaattaataaagattaaaagagagaaagaagggtattatataatggtaaagggattaatttaataagaagaattaattattttaaatatatatgtattttaaataggagtatttagatttataaagtaagtttttagagatttataaagagatttagatttttatatagtaataatgggagattttaatattttattgttaatattagatagattaatgagatagaaggttaataagtatatttaggatttgaatttagttttggattaaggggatcgaatagatatttatagaattttttattttaaattaatagaatatatattttttttagtattatatcgcgtttattttaaaattgattatataattggaagtaaaatattttttagtaaatataaaagaatagaaattataataaattgtttgttagattatagtgtaattaaattagaatttaggattaagatttatttaaaattgtataattatatggaaattgaattatttgtttttgaatgattattgggtaaataatgaaatgaaggtagaaataaagatgttgtttgaaattaatgagaataaagatataatatattagaatttttgggatatatttaaagtagtgtgtagagggaaatttagagtattaaatgtttataagagaaagtaggaaagatttaaaattaatattttaatattataattaaaagaattagagaagtaagagtaaatatatttaaaagttagtagaaggtaagaaattattaagattagagtagaattgatggagatagagatataaaaaatttttttaaaaaattagtgaatttaggagttggttttttgaaaagattaataaaattgatagattgttagtaagattaataaagaagaaaagagagaagaattaaatagatataataaaaaatgataaaggggatattattattaattttttagaaatataaattattattaggaatattataaatatttttatacgaataaattagaaaatttagaagaaatgaataaatttttggatatatatatttttttaagattaaattaggaagaagttgaatttttgaatagattaataataggttttgaaattgaggtaataattaatagtttattaattaaaaaaagtttaggattagacggatttatagttaaattttattggaggtataaagaggagttggtattattttttcggaaattattttaattaatagaaaaagagagaattttttttaatttattttatgagaatagtattattttgatattaaagtttggtagagatataataaaaaaagaaaatttaagttaatatttttgatgaatattaatgtaaaaatttttaataaaatattggtaaacgaaatttagtagtatattaaaaagtttatttattatgattaagtcggttttatttttgggatttaaggttggtttaatatatgtaaattaataaatgtaatttattatataaatagaattaacgataaaaattatatgattattttaatagatgtagaaaaggttttcgataaaaatttaataattttttatgttaaaaatttttaataaattatgtattgatgacgtattttaaaataataagagttatttatgataaatttatagttaatattatattgaatgggtaaaaattggaagtattttttttgaaaattggtataagataaggttgtttttttttattatttttagttaatatagtggtggaagttttggttagggtaattaagtaagagaaagaaataaagggtatttaattaggaaaagaggaagttaaattgtttttgtttgtagatgatatgattgtatatttagaaaatattattattttagtttaaaatttttttaagttgataagtaattttagtaaagttttaggatataaaattattgtataaaaattataagtatttttatatattaataatagataaatagagagttaaattatgaatggatttttatttataattattataaagaaaataaaatatttaggaatttaatttataagggatgtgaaggatttttttaaggagaattataaattattgtttaataaaataaaagaggataaataaacggaagaatattttatgtttatggataggaagaattaatatcgtgaaaatggttatattgtttaaggtaatttatagatttaatgttatttttattaagttattaatgattttttttatagaattggaaaaaattattttaaagtttatatggaataaaaaaagagtttatattgttaagataattttaagtaaaaagaataaagttggaggtagtacgttatttgattttaaattatagtataagattatagtaattaaaatagtatggtagtggtattaaaatagatatatagataaatggaatagaatagaggtcgtagaaataatattatatatttataattatttgatttttgataaatttgataaaaataagtatggggaaaggattttttgtttaataaatggtgttgggaaaattggttagttatatgtagaaagttgaaataggattttttttttatattttatataaaaattaatttaagatgtattaaagatttaaatataagatttaaaattataaaaattttagaagaaaatttaggtaatattatttaggatataggtatggataaatgttttatgattaaaatattaaaagtaatggtaataaaagttaaaatagataaatgggatttaattaaattaaagagtttttgtatagtaaaagaaattattattatagtgaataggtaatttatagaatggggaaaaattttgtaatttatttatttggtaaagggttaatatttagaagttataaagaatttaaataaatttataataaaaaaattaaataattttattaataagtgggcgaaggatatgaatagatattttttaaaagaagatatttatgtagttaaaagatatatgaaaaaatgtttattattattggttattagagaaatgtaaattaaaattataatgagatgttattttacgttagttagaatggtgattattaaaaagttaggaaataatagatgttggagaggatgtggagaaataatatttttatattgttggtgggagtgtaaattagtttaattattgtggaagataatgtagcgattttttaaggatttagaattagaaatattatttgatttagttattttattattgggtatatatttaaaggattataaattatgataaggatatatgtatatgtatgtttattgcggtattagttatagtagtaaagatttggaattaatttagatgtttattaatgatagattggattaagaaaatgtggtatatatatatcgtggaatattatgtagttataaaaaaggatgagtttatgttttttgtagggatatggatgaagttggaaattattatttttagtaaattattataaggatagaaaattaaatattatatgtttttatttataagtgggagttgaataatgagaatatatagatatagggtagggaatattatatatcgaggtttgtgggggggttgggggttagggaagggatagtattaggagaattatttaatgtaaattacgagttgatgggtgtagtaaattattatggtataggtatatttatgtaataaatatgtatgttgtgtatatgtattttagattttaaagtataataaaataaaaaataaaaaaaattttttttattttttaaattgtatgttgttttgtagtaatatattatgtatattataaagtgttttaattagaaattttagaagatatgataaagaaaaataatttaaataataatttttatttaaaatataaataatagggttgggcgcggtggttgacgtttgtaattttagtattttggtaggtcgaggcgggtagattacgaggttaggagtttaagattagtttggttaatatggtgaaattttgtttttattaaaaatataaaaaattagttgggcgtagtggcggatgtttgtaattttagttattcgggagattaaggtataagaatcgtttgaattcgggaggcggaggttgtagtgagtcgagatcgtattattgtattttagtttaggcgatagagtgagattgtgttttaaaaaagaaaaaaaaagaaaagaaaagaaaaagaaaaaagaatattttgtttttataatattattaattatatatttttaagtgagagtaatatgattaattatgtttaattatttttgaaaatgatgttttaataatttgtaatgtagatatttgatggtttggttttatgttgagtttatgttgatatttggttttaaggatagttagagttgataaaaataatttgtgtatagattaggcgcggtggtttacgtttgtaatattagtattttgggagtttgaggcgggcggattacgagattaggagatggagattattttggttaatacggtgaagtttcgtttttattaaaaatataaaaaaaattagttaggtgcggtggtaggtatttgtagttttagttatttggaaggttgaggtaggagaatggtgtgaattttgtagtgagtcgagattacgttattgtattatagtttgggtaatagagcgaaatttcgttttaaaaaaaaaaaaaaaaagaaaaaaaaaaagaaataatttttgtatatattataacgtttatatataatgaattattgatatatttattaaaatgtgatttatttaggaaaattttatttttaaattatttaaagtttttgtttttttttagttattatatttttgttttattttatgtaaattaatgagaaattattgttttaagattggtggttttttggtatggttgtgtaatagttgttgttaaattttagagtttaaagtgtattacgaaagttagatggtaggttagatttagtttttttgttaaatgaaatgtttattggttagggagaaataattacgtggaaaattaaataaatttatgatatttgtagttagtagttcgggtgttttgtagggttttttttgagaagtggggattaatcgtatgaattattttttttttttttttagagttttatttatttgtgagtaaatgtttttaattaaagtattgttattaagttttagtttttttatttttattatggagttaaaatgtttattttatattgtttataaaagaattaagatggtcgggcgcggtggtttacgtttgtaattttagtattttgggaggtcgaggcggacggattacgaggttaggagatcgagattattttggttaatatagtgaaatttcgtttttattaaaaatatgaaaaattagtttggcgtggtggtggacgtttgtagttttagttatttaggaggttaaggtaggagaatggcgtgaatttaggaggcggagtttgtagtgagtttagattgtgttattgtattttagtttgggcgatagagtaagatttcgttttaaaaaaaaaaaaaaaaaaaaaaaaaaaaaaaaaaagttaggtatggttggtggtttatatttgtaattttagaattttgggaaataggtaggattattttagtttagaagtgtgggattagtttgggtaatatagtgagattttgttttttaaaaaaaaaagaaaagaattaaaataaaataagaaaataaaaatatagaataagtgtattattatagtggtgataatttttaggaaattttttttgtttttttttgtgtgaatttaattgatttaataagggagtgtgtgaatatttttatgttggtttattttttatgtgtttaaatggataaatttatttaggatttggttgttggatttatttttaggaagaataaagaaaaaggaagtttatttttagtattttttttttgtttttgttttttttttggttatagttatgttttggattttagtgtttttaaatatttagtagttttttatttagtataatttttgttgaggtttagggtacgatggtgggagtgggtgtagaagagatagagagattattggtttgagtgtttagggtttgggtttttaggaagaatttggttcggcgcggtggtttacgtttgtaatttaagtatttcggagatcgaggcggttggattatttgaggttaggagtttgagattagtttggttaatatggtgaaataacgtttttattaaaaatataaaaaattagttaggcgtggtggtaggtatttgtaattttagttatttaggagtttgaggtaggagaattatttgaattcgggtcgcggaggttgtagtgagtcgagattgcgttagtgtattttattttgggtaataagagtgaaatttcgttttaaaaaaagaaaaaaaaagaagaattttttgatttgatttagtaggattttttttatgggtttagagttaggtgtgaagagagtgagttcgtggtgagaggaatttgtttattaaaaggagtttatgtttagtggtagaagtggagaggtgggtatgggatatatagggaagttgtttttttttgttgtttgtggtttttgttggaggatgtgttgtgggaatgtaaggaggagatggaaggaaggtgttaatatagttttaataaaggaaaaaaaaatgaaaatatcgaaattatttttgtaaaaattgtaatagtgagaaaattatgatattgaaagatatttaatttaatttaatttttttttgtttttaatttttaaattgtatttagttatttttgagtaaaggttaagttaattttgggagaaatttcgtttatagtttaaatgataatagttttttttaaaattaatttgtttttgtaaaaatgatgaaaggttattaggttagggaggatgagaggggtttgaatgtaggtttagataaataattattcgttattgttttagaggttataagatttgtaatttttttaattagttttgtaaaatgatattattgtggttttttgagatgtttttgtagttattttttgttttgtttgttttgagataaggttttgttttgttattaaggttggagtgtagtgattatagtttattgtagtttttattttttgggtttaagtgaattttttattttagttttttaagtagttgggattgtaggtgtatgttattatgtttggttagttttgttgttttttggttttggggtgttttttgtttgtttgtttgttttgtttttgtatttttagtagatatgatgtttggttttgttgtttaggttggttttaaatttttggatttaagcgatttttttgttttagttttttaaattgttggggttataggtacgagttattttgtttagtttaggtttttttattttggaaaattagatgattttatttagatttaagatcggttttatggttttatttagaagtggatttagtgtacgaggattattttttatatttttatgattgtattttaattaattagtagtatttattttttagttatttgtttagtaaattattttttttttttttttttttttgagattttgtcgtttaggttgtagtgtagtggtgtaattatggtttatagtagttttaatttttttggtttagttttttaagttattgggattataggtgtatattattatatttggttaatttttaaattttttgtagagatggtgttttgttgtgttgtttaggttgattttaaatttaaggatttaagtaatttttttattttagattcgaaaagtgttgggattataggtgtaagttgttatgtttaatttaaattattttgaaaaagtttttaaatttgagaggaggttgatataagtaataataagattttagttttttgtttaattggttttatgtatataaaattttttttttattgtaatttttttgtttttataaattggttttatttgagtagtaggtaaaatgaattaattgggtggttataatagtattagtatatatagtagaattgtaatatttattatatattaattgtaaattaattttaaaagatatattgttaaaagtatataagtgatataagtaatttatagaagaataaatttaattgaataataaatatgaaattatttttaatttttttagttatatagtaaaagtaaattaaaattttttttttttttagatagagttttattttgtcgtttagggtggagtgtagtggcgcgattttagtttatcgaaatttttgttttttgggtttaagcgatttttttgttttagttttttgagtagttgggattataggcgttcgttattatgttcggttaatttttgtatttttagtagagacgaggttttattatgttggttaggttggtttcgaatttttgattttaagtgatttattaattttggttttttaaaatgttgggattataggtatgagttattgtatttagtttaaaataatgttttaattttttgttgataagagtgtaaatttattatttttgggggaagtaatttagtatttattaatattaaatatttttataatttttgatttagtatttttatttaaattagtgttttagttagtttgggttgttataataatattatagtttggatggtttatagataatagaggtttattttttatagtttttggggttgggaagtttaggtattaaggtattggtagttaaggtgtttggtgaaggttttttttttgtttttagtttatagatgttttatttttatttttttttttttttttttttttttttttttttttttttttttttttttttttttttttttttgtttttttttttttttttttttttttttttttttttttttttttttaatagatgagggttttttttgttatttaggtggttggagtgtaatggtgtaagtttggtttattgtagttttaattttttgggtttaattgatttttttattttagtcgttcgagtagttgggattataggtgtatgttattaggtttagttaaatttttgtaattttgtagagacgaggttttattatgttgtttaggttggttttgaatttttgggttgaagtagtttttttatttcggttttttagatgttgggattatagacgtgagttattatattcggtttattttatcgttttgttgtggtagggagagtaatagtttttttttatttttttataagggtattaattttattatgtttttatgattttatttaaattttattatagtttaggttttatttttaaagattattatattgggaattagagagttttaatatatagtttgaggggattataaatattttatttatggtaattaggaatttatagaaatattttttttagtgtgtaaaaaagtaagtataagaatttttggggtttttttgttttttgttttgttttgttttgttttgttttttgagatagggttttgttgttatttaggtatggtatagtagtataattatagtttattgaagttttaattttttaggtttaagtaatttttttcgtttagtttttcgaatagttaggattataggtatatattattatatttagttaattttttttttttttttttgagatggagtttcgttttgttatttaggttggagtgtaatggtacgattttagtttatggtaattttcgttttttggatttaagtagtttttttgttttagttttttgagtagttgggattataggcgtatgttattatatttagttaatttttatatttttagaagagatagggttttattatgttggttaggttggtttcgaatttttgatttcgtgatttatttgttttagttttttaaagtgttgggattataggtgtgagttatcgcgtttagtttaatttttgtattttttgtagagatagggttttattatgttgtttaggttggtttttaatatttgggtttaagtaatttgttcgttttagttttttaaagtgttgggattagagatgtgagttacggtatttatttaagaatgtttttttgaggtattatgtttattagtgaataatgggggggggtcgtggggggagtattagaatagttaaagtaggttgtgtatatataatgaaatattatagtattattttgtaaagatttatatgtattgatatgggaaaatgagtatattataaataaataataaaagttgtagaataatataaattggaagaaatattttttttaatttttttttttatttatttttgttgatatataaataggaaaaagttgggggagagaatataggaatacggaataaatagtaaataatggttattttatagacgtgattggcggtatttttggttttggttttttttttgagatagagtttcgtttttttatttaggttggagtgaagtggtacgtttttggttttttgtaattttcgttttttaggtttaagcgatttttttgttttagttttttaagtagttgggattataggtatttgttattatgtcgggttaatttttgtgtgtgtgtgttttttttagtagagacggagttttattatgttggttaggttggttttgaatttttgattttaggtgatttgttcgtttcggttttttaaagtgttacgattacgggtatgagttattgtattttgttatagagggtatttttgttttttgagttagttagggttttttagagaaatagaatatatatatatacgtatatatatatatatttgtagagagagaaagagagagtgtgatttattttaaggaattagtttataaaattgtggaggtttggtgagtttaaagtttgataggagagtttagtaggttggagatataggaaagagttgtagtttaagtttaaaggtggtgtgttggaaatttttgattagaataaaagagagaggatagttttttgttttaattaggtttttaattgattggatgaagtttatttttattatatttaaagtttattaatttaaatgtaaattttatttaaaaatatttttatagaaatatttagaataatgtttgattaaatatttggatattatggtttagataagttgatatataaaattaaatatcgtaatgagatttgttgttatttatgaatttatgtttttagtgtatttgtaaggtatatggattatttttttatttttttttttatatatatagatatatatatattttttataattataaatatgtgtatgtatgtatatgtatgtataagaaaatatatatatatatagatataaaattatgtatttgtgttaggtatttgtgatggttaattttatttgttaatttggttaagttatggtatttagatatttggttaaatattgtggatggttttgtgagggtattttggatgttttaaattggtgtattttgaataaagtagattgttttttataatgtgagtgggttttatttaattatttaaaggtttaagataaaaagattgaggtttttgaggaagagggaattttgtttttatatcgtttttggatttgagttgtaatattaattttttgttgttggtttgtttgttttgtagattttggatttgttaatttttatgatagtatgaaatagtttttttatttgattggttttaattttttggaatattttaattaatatagtgttgttataggtattgagaatagagtgattaatagggaagaaaacgtgttgttttggggttttgttggcgggtggatggtagatatttaattgtgtgaggtttattggttatagaggaatttatgtaggagaaatttattttgtttaggttgaaaggaggggaattaggtatatatttttttttgaggaatatgttagtagagattggatgtggtaagattataggtggcgggtaggtgggatagagtattttagattagggaataaaaagggataaaagttttggggtggaaaggatatgtttgagaaatagaaataagattaggtgttgggattaggagttttatatttattatatttagttatttatggggtgattttagaagttttaaaagattttgttttttaattttttttttttttttgataagattttgttttgttgtttaggttagagtgtagtggtacgattatagtttatagtagttttaatttttcgggtttaagtgatttatttattttagttttttgagtagttgggattatagatgaatgtattatgtttagtcgattttttttgtttgtttgagatggagtttcgttttgttatttcgagtggagtgtagtggtataattttggtttattgtaatttttattttttaagtttaagttatttttttgttttagtttttttagtagttgggattatagatgtttattattatatttagttaatttttgtattttgagtagggacggggttttgttatgttggttaggttggtttcgaattattgattttaagtgataacgttcgttttagttttttaaaatgttgggattataggtatgagttattgtgtttggtttaatgtaattttaagatgattttatgtatattgtaggagagaaaaataggtaaatatattaagagtattaagagttaaggttttcgattgttttgataaaagatatataaatataaagtttaagaagagggaaaaatttataatgtataatttgaattggaaatattaatatgaatttatgattttttttaaattttaaatgtgatttaaagcgatgatatttttgtagtaacgagtttttttagtattaaagattattttttattaaaacgaattaatgttttttagaaagatggttgattttggtcgggtgtagtggtttacgtttgtaattttagtattttgggaggtcgaggcgggtagattataaggttaggagatcgagattattttggcgaatatagtgagattttgtttttattaaaaatataaaaaagtagataggtatggtggtgggtatttgtagttttagttatttgggaggttgaggtaggagaatggtatgaatttggggatagagtttgtagtgcgttgagattacgttattgtattttagtttgggcgatagagtaagattcggttttaaaaaaaaaaaaaaaaaaaaaaaaagatggttgattttggttaagtgtagtggtttatgtttgtaattttagtaatttgggaggttaaaggtaggtagatgtagattatttgaggttaagagtttgagattagtttggttaatataatgaaattttatttttattaaaagtataaaaattagttaggcgtagtggtaatgtttataattttagttatttaggaggttgaggtgggaggattatttgaattttggaggtagaggttgtagtgagttgagattatgttattatattttagtttgggtgatagagtgagattttgttttaagaaaaaaaaaggaaagaaagaaagaaaaaagaaaaagaaaaatggttgattttatatttggagttgggaaagtaaaaaaaaattgtgtttgggatatttagttgtgttaaaagtaagtaagtgtttatagaatttttggggtatgttagaatggatgtaggagttagtttaaaagggtttttattggggtttttttttaatttagattattttggttaataaggtgaaatttcgtttgtattaaaaatataaaaattagttggttatggtggtatgtatttgtagttttagttatttaggaggttgaggtaggagaattgtttgaatttaggaggtagaggttgtagtgagtcgagatcgtattattgtattttagtttggtgatagagtgagattttattttaaattaaaaaaaaaaaaaaaggtttttattggatatataaggtatagttcgagtataaaaaaataatgattgtaattaattgtgaaatattaaatggatatttggtatggtgtagttttagtattttgaggttaaggtaggtggattatttgattttaggtaatatggtaaaattttatttttataaaaaatataaaaattatttgggtgtggtggtatgtatttgtggttttagttatttaggaggttgaggtaggaggattatttgagtttggtaggttgaggttgtagtgagtggtaattgcgttattgtattttagtttgggtaatagatcgtgatgttgttttaaaaaataaaagaaatattgaatggataaaaattttaaatttatagtttaaaaaaagaaaaaaaataaattttttatttttggagattaatattatattaatattttattttgaaaattggtaaagggaaataagtatttattttgttttttagaaggattttattttggtcgggcgttgtggtttatgtttgtaattttagtattttgggaggttgaggtaggtggattatttgaggttaggagtttgagaaggattttattttttttagttggtgagagaaagtttttttttaggtaattatgtttttataaatgtagaagtgggagaattagaaaagtattttttgtaatttttgatgaaataattaatttaagtaagaattattgtagatggcgataagagaaagttttttagcgtatatatatagtgttaaagaattatgtagacgatttgttaattgttaagagggaaatataatttttatagaaaagatttgatcgtgtttattttaattaagtaattatatttagtattattgtttgtgggatggttttatattatatgttttttgatgtgaggtaatgtgatatatatagtaagtttgaggaattagttttaagattgggtaatttgaatttaattaagtaattgggggaaaattttttaaaatttagggagatagatgaatatattaagtgatattaaagaaatagtaagataaatttagaatgttgaatagtttaaaagataattgttttagtatttttaaagatttaattttaagaagaaaaaaattggatgattgtagattaaaaagaaaggggtgagaaaaggatataaaaaaatgtaatgttgaaatttgattggtttttgttttgggagttttttaaaagttatatattaaaatattatgttatatattataaatttatataatttttatttggtaattatatttaggaaaaattaaatgttataaaaggtatttaaattggagaagtttaatgttagatgatattaaaaattattaatttattaaatatgatgattttattatgattgtgtaagagatgtatatgacgtatttaggggtgaatggttatgatgtttgtaagtttttttttttttgagatggagttttgttttgttatttaggttagagtgtagtggtattattttggtttattgtaatttttattttttaggtttgagtaatttttttattttagcgttttgagtagttgggattataggtatgtattattatgttcggttaattttttgtatttttagtagagacggggttttattatgttggttaggttggtttttaatttttggttttaggtgattcgtttatttcggttttttaaagtattgggattataggtatgagttattatgtttagtcgatgtttttaatttttaaatggtttagggttgggtgtagtgtaattttagtattttgggaggtcgaaggaggcggattatttgaggttaggagtttgaggttattttggttaacgtggtgtaatttcgtttttattaaaaatataaaaattagttaggtatggtggtgtatatttgtagttttagttaatggggaggttgaggtaagagaattatttgaattcgggaggtagaggttgtagtgaattaagattgtattattgtattttaatttgggtgatagagtaaaattttattttaaaaagaaaaaaaaaagtttaaatggttgagaaaagataatatttgtatattgttggtaggaatgtaaattagtatagttattatggaaaattgtatggcggttttttaaaaaattaaaaatagaattattatatggggttgggtatagtggtttatatttttaattttattattttgggaggtcgaggtgagcggattatttgaagtcgggagttcgagattagtttggttaatatggtgaaattttatttttattaaaaatataaaaattagttgggcgtggtggtgggcgtttgtaattttagttatttgagaggttgaggtaggagaatcgtttgaattcgggaggcggaggttgtagtgagttgagatcgtgttatcgtattttagtttgggtaataagagtgaaattttattttaaaaaaaaaaaaaagaattattatatgatttagtaattttgcgtttgggtatttattaaagagatttgaaattagtatgtcgaggagatatttgtatttttatgttcgttgtagtattattaattatagtgaagttatatagttaaatcgagtgtttattagtagatgaatggataaagaaaatatggtatataggtcgggcgtagtggtttaagtttgtaattttagtattttgggaggtcgaggtaggcggattacgaggttaggatatcgagagtattttggttaatacggtgaaattttatttttattaaaagtataaaagaattagttgggcgtggtggtaggcgtttgtagttttagttattttggaggttgaggtaggagaattattttaatttgggaggcggagtttgtagtgagttgagattgtattagtgtattttaatttgggtgatagagtaagatttcgttttaaaaaaaaaaaaaaaaaagaaagaaagaaagaaaatatggtatatatatcgtggaatgttatttagtttttaaaaagaaattttgttatttgagatagcgttaatggaattggagaatattatgttgagtgaagtaagttaggtatagaaagataaatattgtatgtttttatttataagtggaatttaaaataatcgaatttaaaggaggagagagtagaatagtagttattagaggttgggggtttggggtaaatggggatatgatggttaaaggttataaagttttattggattggaaaaataagtttttttttttttttgagatatattgtatagtaaagtgaatatagtaaataatttttggatattttataagtgttgagggtaaatattttttttatatttttaatatatttttttttttgaatgtagagagtaaattttaaatatttttattataaaaaaagtaagtatttaaaagtgatagatgttgggtcgggtgtagtggtttacgtttgtaattttagtattttgggaggtggaggtgggtggattatttgaggttaggagttggagattagtttggttaatatggtgaaatttcgtttttattaaaaatataaaaaattagtcgggtatggtggcggacgtttgtaatgttagttattcgggaggttgaggtagaagaattatttgaattcgggaggcggaagttgtagtgagtcgagattgtattattgtattttagtttgggtaataagagtgaaattttattttaaaaaaaaaaaaagtgatagatgttaatttgtttgatttaattattttatagtgtatttatgaattataatattattttgtacgttataaatatatataattataatttgttaatttataattaaaggttaaaatttttaaaaataaaaggtaatgataataaaaaaaatggataagtagatagaaaaatcgattaatatagaagttggtaaaaattagtaaagtaaatatggtaaaatgtagaatttgttgaattttttagtatttgggtgtttattgttttttttttatgttagaaattttttaaaataaaaagttgtaaatgatttttatattattttgatttttatatagtaatagaaaatatttttggttgtagtttattaatattttttttttgtttttttgaggaattaaaagatttttatttatgatatgttaaaaggtatataaagaaatatatttaaattttgttgtttttttatttaagtttggttttaatattttattaaaaatttttgtatttgtaaatattaaaatattgaaatttgttattgatataagaacgataatgtattaataataaaattaaagtagaagttaaattatttagaagtagtagtaattttatgattttaaggtaatttaaataggtaattttagagtgttttaagatgaaggcgtaaagtagttttttagtttgtagtgatgttacgatatcggtagatggcgttgtaaagttttttaaatgtagcgggaagtttatttattaacggttgttgcgattttttaattagtttgaattgagtttgtattagaatttataatttttattgtatattgtagttattcgtatattattgatattggaatagatatgttttaataaattggttgagtcgtattagtgcgaattagttgaatgttagcgttgtttttttttgtgatagaagttatcggcgtttgtttgagggtattttttttattgggatttttagtattacgtttatttgtttttaaggtttgttttattattaagttttattttttagtatttttattttttttttttatttgatttttttttttaatatcgtgttaatatattttaaattaaaaaagttttttaattgtatatattttgttttttttattttttttttttattgtaattattgttaaatattttgaaaattttttttttatttttattgtttttacgttttttttttaaattattttttaattttttgatatttggggtttttgattttatttttttaaagaaatgtttttattaagattatggaggtttttttcgttgttggtggatattcgtttatttttttcgttattatttattagtagcgttttacgtcgtttttttttttttttttttttttttagttttattatattacgttattaggttttttttgttttattggtttttttttttgtttttttttttatatgttttttgtttttttttttagttttttttgttttttatatttatatgttgatgatgtttaaatttttgtttttagttacgatttttttttttttaagttttatttgtataaattgtttttgatgagatttagggcgtttacggtggtatggttgtagataattgttttaggaaatagatttatgatttatttagttgttaagttagaaataggatgtatatttttgatttgttttttttttttatatagtaaaataattttaagatatgttaattttattttttgagtaatttataaaacgattttttttttttttattttttattattttaattttggtgtttattttttttttttgggatggttgtaaaagtttttgattttttttttttttaaattagtttttatattgtaattatagtgatttaaggtaaatttttatttttttagttttaggtttaaagtttaatatttttttggatatagtttaaatttttaatacggttgaaaaggtttagtaagagttggattaagtttatttttttagttttatttttttttattttttttttgtattttttgtttttgaataagttatagttttttaaagttgttatgttttttgatttttgttgttttttttgtttagaatgtaatttttttgtttggttaatttttgtttagtatttggttttagtatggatatttgtttttttaggacgttttttttgatttattaagattagtttaattgtttttattggttgtttttatagtaattttttattatagattattgattttttgtgtttgttttgttttggtagtttgatataattttatattaatgtagtttttagttttgttttttatttttttttgattagtattttaatgttttttttatatggagttattattattttataggattttgtattattttttttttagaatttattatattttttttttgtaattgtgtttttattttttaataaattgtgagtgttataaagaattatttttattttatttattatttggaagtgattggtaggtagtaattgtttaataaatgttttatgagtgaatgaatttttgggataattatagtattaattattttatttagttatgatagtttaatagaaatacgtaaaataatgtttttatagtttatatattgttatagagttattgtattatattattattattttatttttattttttattgtttgagagtaggatattgttttatttaattttggttattgttttagaatttagggatatatgtttggtatatattgtttttaattaatttttgttgattgtattaatgattgtaagaagtgaataaagggttagataattgaattattttggattatatatagttattttgttttagaagtaggattataattttatttggaaaaagggaaatttggaagttgatatttaaatgaaattttagtatggatgagagaagttttgatttttttttattaagagattagttagttatggaagttattagagttttagatttttatggttaagtatttatatagtagatatgatttagataagagggtgcgtattttagcgtggaggggagattgggtttttggttttttgtgtttttgtagttagttttaattttagttttaggtattggtgttggggttttatttatttttatttgtacgttttttagttttttttttgttgttattattttatagagttagtaagttatggaagaggttttatagtttaattttgtgggggtgttaggagttgttttttgttaggtttttagtataaaaattttttttttttagtttttagttaattttttatttttatttttagatttttttaaatatttttgatgaaatttttgaggtggaaaaagataaagataagtaaagataaatagtataggaagtagaggtataaatagaattttgattttttttttttttttttatattttgaggaaatgaatttaatgtttttattttattttttgtagcggagaagttttttgagtatttttgaatattatgaatttttaaagtaagtttagtttgggttttttttttttttttattagtgaggttaaagagttttagatgggagataggtggattttttttttagttgggatttttttttttttttgtttagtatattttgggaaatttttaagtatatttttatgttggtattatttaaattttgtattggagtgaattttaggagttatgtttatattgagattaatggagatgaatttaaagtaatatgtggttaaatattttagtttttttaaatatatttttttttgttttttggttaatagggtttgtttgttcgtattagagaaattgtttagtgatttagattttgaaaggatttgttttagagaaaaaaggagtttggtattttttattttatttagtgggtaatttgtttaattatattttttgttattatttaatatagataatattggtagttaataaaaaagtttatttttttatttttaaaagaatttaatttaggagtttagttgttggtttaataaagggatatatagtaaagtttaaggtgttttgatttacgagagagttgatttttgtcgaaatgttgaggtgaaattttaaaatggttttggttatttgttaggttttagtttagattttgtattggattatttttgttttatttttaaattagagtaaatggaatttaggaggttggttttgtgttcgtttttatgtattttaaatattcgtagttgttaagtttttaaataatgaaatttaatattgtatttaaagggttgttttgtttaaattataaatgtgtacgttagttgtttattagtaattaaaattattcgtatatatttaattaatatttttataagcgttttgttttaattaaaaatttgtattaatatgaagttttagaattatattgtatgagtttttaggatttggagaatattatttattttttttaatttaaaaatttgggtgtttgaaggtggggttttgattatggttaggttttaaatttaggttaggttttggtggtatatttttatatgtttggtgtttagtataggttaagatatataatagatttttaataaatatttgttgaatttgaataatttttgtaaaaattttattaagagatattagtttgggatatagttttttttttattgtttttttttttagaagtttttggaatgagtaggtttggcggtagggggtatatagggttgttgtttaaatcggagaatggtataaattttaaaagggagttggatttagattttttttttttatgtagataacgggatttttaaggtgtagagtgggagaatgggtagaggaagtaggttttagagattgagaatttattaaatttttaagagaatttttttttgtaaagagaatgtatgaaaaaagaagggagaagaggagagaagttttttatagttgttagtttggaatagtcgtttttattttagtttatttggggaaggggttataaagtaaataatttttatttataattggggtggtagaggggagatatttttaggttagtttaaaagtaaagatattgggagggaagatggcgttgggcgaggaatttagtatttatttttatttagtagggtataagggtttcggttagttaggttggattttggagtcgaggttggggtttttttatttttttttttttttttattcgtatttcggttttttttttttttttttttataggagttgtttagtttttttttttttttttttttttcgttatttgttggttttattttgttttgtaaaattattagtttcgtggtttttggatgggatttttaggtgtttggggaattaaaataagaaaaaaatggaggagagttttgagtaagaattaaagttaaggaaagatggggaagaggtaaagattaggaataataataatttttagagttgttggtatttatttatttatttatttatttaattttttatgtgtagattgttgaatagaatttttgtgtatattaattttaatttttataattattatgttaagggttaattattatttttagtttgtagattaggaaaatattatagatgttaagtaatagagttagttaataggtatagaatttaggtttgattttttttttggttataaagtttatatttttttatttacgttatagtagggggttggggaagaatatttgggttttgatttttttgtttattgtagtttgggggatgaaaatataggttgaggcggtcgtttattgttagtcgtaagagattgttggttgttttgtatatattatttcgagtcgttttggttgttttgtaattacgtttttttgtttaggttggaggaagaaaagaataatggaaagggaaagtattaattaggtattagttatatttttatttttataatatagtttttttagttttttttaaaatattttaggttagagattttattggttatgtaataaaaatttaggggtgagtggatagtagttttattaatggtagaatttttgaggagaggaaaggagatagggaagggtaaaaggcgaggtaggtaaggaagagtagttgaaattaggtggggcgaagttaggtatatggaatttatttttatagatgttttaggtatattaggggtgtttcgttgaggggtttttagtttttgggtggcgtaggtggagtagggtttgtacgggaattcgggaggttaggtagtttatagtagtgtagggtttttggatttgggcgatagggtagatttttgttagaatttgagggaaatgagtatttagtattttttttaatgttttatttttttttttttttttatttatttttttcgttatatttgtaattgtttaggtagaagagatgggaagatgaggtttgggtagttatagagttttatagagggggtaagaaagtaggtttgaaagtatcgggtatggttcggggttttggagatatttacgatttttcgttttattagtttattgattagcgaggatttttttatattagggaaatttgaggaaggtaaggaaaattaacgtttaataggtttttattttgtgatgggatttggtgttatatttataggtaaaaggggaattaaggtttagaaattaaggaaatggtattgtagaatataaattacgttttgggttgttagggttaaattttggtttttttatttattagttttgtgatgttagggtaattaattttttgagtttttgtttttttattttatagtgtggatatttttttattttagggtggttaggattaaatgagataattaatataatttgtgtgggttagtgtttgtagtatagtaagtatttagtattagtgatttatattttataattattatgatttggtttggtatagtggtttacgtttgtaattttagcgtgattattttgggaggttaaggcgggtggattatttgaggttaggattttaagattagtttggttaatatggtgaaattttatttttattaaaaatataaaaattagttgggcgtggtggtgggcgtttgtaattgtagttatttgggaggttgaggtaggagaattatttgaatttaggaggcggaggttgtagtgagttgagattgtattattgtattttagtttgggtaataagagggaaattttattttaaaaaataataataataattacgatgatttgtttaaggagaaaattggaagttttggggtttattgttattttgtttatttattattattagtttttgtgtttttggttgattttagtgtttttattttttttttatagagtattttttttattttattttagttgtttatttttatggtaatatttgtattttgttattttatagttttaaagttttaattttaagtatttttttttgttttgataatttatttttttagtttatttattttggttattttatgttagtaagtttttgatttttgattttaatatagtaatattatgtaatatttaattcgtgtttttaattttttttttatttgatttagattttatgatttagttttttagttagggtcgtttatagatttggaattttttggttttattttttttttttattttatttatttggtaaaattttaattttgtaaaatttagttttgtttatttagtattgtttttgggtagttgattgtggttaagaaaagatgtattattgtgtttattttttataatatatgtaagtatttaggaggaagggagggaaggagggagaaaaaagtttttttttgacgattattattagatttagttttttgttcgttttgtaggaaaattttttaaaagatttatttattttttttattatttttttttgttattttttttgtaattgtaaattataatatataaaaaaatgtatagaatatatatgtgtagtttgatgaattttatattatttaatgtgtgataatatgttttatttgtttttgtttttttttgtttttgtttttgagatagagttttatttttttattcgggttggagtgtagtggtgcgatgttggtttattataattttatttttttaggtttaagcgattttcgtgttttaattttttgagtagttgagattataggcgtgcggttttatatttggttaattttttgtatttttagtagagatagggttttgttatgttggttaggttggttttaaatttttgattttaagtaatgcgtttgttttagttttttaaagtgttaggattatagggatgagttattatatcggtcgttatttattttttttgattataattttttttttttatatatgtaagttttatttttttaaggaaattaattttttatatttttttttagtttatgatttgtgtattttttaataatgtagtttaattttgtagtttttaaatttgatagaattgaaattgtgtagtatggatgttattgggttagattttttttatataatgttatgtgaagttgttgtatttttttttatgggtttattttagtttggttttttttattttattgaaattacggatttttatattgttaagtttgttgagtagttttttgtttttttatttggtttgttagtaatagttgatatagttgatttttttttttttttttaaatattttttttatttgatttttgggacgtttttttggttttttttttttttattgttttttgtttaattaaatgttggtttgttttaaggtttagtttttgatttttttttttttaattatttttttttttttttatattttatttaattttatggtttttttttttttttttttgacgaagttttgttttgttatttaggttggagtgtagtggtatgattttggtttatcgtaattttcgtttttaggatttaagtaatttttttgttttatttttttgagtatttgggattataggtacgtattattatatacggttaattttttgtattttttggtagagatagggttttattatgttggttaggttggttttaaatttttggttttaagtgatttatttgttttagttttttaaagggttgggattataggtatgagttattgtgtttagtttaattttgtggttttaaatattatttatatttattaatggttttttaaatttaaattttttttaaatttaaattttcgttttttttttttttttaagttgttgattatttatttattgtttatttaatatttttattagggatatttaaaaagaatttgaaattttatttttgattttttttttttttttaaagtttttaaatttgttttttttttagtttttttattttagtatttttagttgtttaagataaaaatttggaagtttttttttatttttatttttttttacgtgttaattgtaagttattagcgattttattttttttatttttaaaatatattatgttttcggttttgttttattatttttagttttagtattttattttaagtaatttttattttttttttagattattgaaatagttttaattgttttttttgtttttttttttgtttattttttattatttattttttatttaggaggtaaatttataagaaataaaattagattttattatttttttgtttaaaatttatttttggttttttatgagatttggaataaaatttaaaatggttgttatagttttagggttttatatgatgtgggttttggtgattttgttgattttatttttagtattttattttggtttttatattttaattttttgggtatttttgttggttttagaatttttaagtttattttttttttaagattttttttttatagttttgaatggtttattttattttattatttagttttttttttagggaggttttttttgagtatttttttttttagttattttttatttttttttattgttttattgtttttattgtttttatatgatttcggattataaaatttatttatttataagaaaataagttttatgaatttatagatttttttgttatttttatagtagtatgttttatttttagaatatttggtatttggttaagtgtttagtatatatttgttgaatgggtaaatgaatgagagttggagggaaatttaaatttaggggtgtttgtgttatagtaaatatttttttttttatattatttggaatagagattagttagagtagaggttgttaagagagggaatagaggttttttgtgatagggagattaggattagaagttagggaagggatagtcgggtgaaatgattggaaagaggagtaattatttagtagtaaggtaggtttttttaaagataaaaaggatatagagataagttagggtatttttaaggaatttaattatttattttatatttttaaatttattttgggttgggttttttttggttttaatattatttcggatattataatttgtttaaggtttttttttattttttttattttaaatgaagacgggttttgggttttaattatatattttttttttttttattgtgagttgagataaagtttttaagaggagattttttttggtaataaatttaaagggttaaaatttagaagaatattaatttttgttgagtttttattatgatttgataattattgtattatagattaattattataatttaaatggtttatataaattatttaaaatagtgtttgttatatagtaagtattatataaatattgagttttaataataataattgttattattgttattattatttgttaggtatttttatatttttttaatattatttttattattttttatatttattttttttttttaaagatagggtttttattagttaggttggagtgtagtggtataattatagtttattgtagttttgaatttttgggtttaagtgatttttttgttttagtttttgaagtagtagagattataggtatatattattatatttggttagttttttttattttttgtaaagatggggttttattatgttgtttatattagttttgagtttttggttttaagtaatttttttattttagttttttaaagcgttgggattatataggtatgagtttttatatatggtcgttatttatttttttatttaggtattaatgtttttatttttaaaattaaagtaattaagatttagagtagtaaaattatttatttaagattttatagttgagaagaggtggaatttaatttaggttgttatgatttttttattgtagtagacgttttttttgttttgtttatcgttattggtagagattattttttagatattttggggtttaatgagatttgatcgttttttttttttttcgaatatgaaaattttgtatttttttggaggttattacgtataagttgttatttttttatttatatagtcgatggttattattttatttttgtagcgtttttgggttgggttagttggttttattgttgaattagtttgttgttttattaggattgttgggttatttttttttttttttttttttttagagttattattttaggtggttttagttatatttcgagtaattttttttcgttagttgtttaagtttattgtttaaagaaggagaagattaaagaggttttttttagggttgttgtgtatgatggtatatattgtgttttgtatagattatgtaattggtattttttggagttgtatagtgttaatttaaataagagtaggttagagaattttttaaaagttatttgattttattttttttggaattacgtacgtttttttgagtttttgaaaagtattgggaaggttaaaggtagtaagttattgaggtttttgattatttgttgtttttcgttttattaagttagtttgttttttattttgtttttttttttggttttttgtatatatttattatagaggggttggttttaggaaaggtgagtaaaatgattttgtatttttggttttttttatgtttttttatagtttttttttaagggttatatatttttttttatagtgatggttttataggtttttagtaattgttttggttttagggttcgagtttattttttttttcgttttcgatttttttttaagattgagattagagggtataaaaggatgggtatacgggtttaggttttttattttttttattatttttaggtttaagattaggtgtttttttgttaataagtttttttgtttttttttttgttttttgttaatttattttttttaagttgtttttttttattgtttatttattattattaggattttgtggggtgcgggggtttcgaggaaaagaggtgaaaaggacgacgtggagttggggatagtgttgatggaaataatgtttttaggtaattataagagttggcggggttagatttattttgtttaaaattagtattagggttagtttaagttttttagttatatatttataaagtgttggcgggaaatttataatttaggatagagttgataagaggatggagtagtgaaagttaatttagagttttttgtttttagttttttatttagtaggtgtagtttagagataaggttttggtggtagtagattttgggttaaaaattataaattagataaattgaaaaataaagataaaataggggttagtaatatttttgagttttagagggttttttataggttatgattagagatggaaatgaatttaaaataagataaggaaatagtattatttagtatattgaggtaaaggttgggatcggaaatagggatgggggttagggtagaaattagtttgtttttttgtgtgtgtataattatgtaagtgtgtatacgtgtatatatgtatgtatgtaagtacgtgtatatgtgtgtatgtttgtgtgttaatgtgattgtgaatatgtgtgtaaatatgtttgtgtatattgatgtgtatatgatgtacgtgtgagtatgtgtgtgtatatattattaaggatttttaatttaaatggtttttatagattttttttttttttattggaggataagagtgaagttgtagagttaggatttatatagggtagtttagtagtagtttatagttttaattattattttagtattttaggtgggttttgtagtaattgatgtggtagtgttagagaaatgagataaggaagaaagggtatttttgggttgggtaggaggaagtttttagttgtatttatagaatttttggagttttaatatttggattttttattggtttgtgatgagttaaaggataggatatggttgttttgaagagaagagtgagttggttaagggaggaatgataggttataagagaataaaaaattgagtttttaattgcggatattagtattaggtagagattagaaagataggaagatagatatttttttgttttttaatttttgtttttgatttttgtttttgaaaaattttttttttttttttttgtttatttttatttttagtatttattggatgtcggatattagtgataagtaggacgatgttagatatttttaatattcgttatagttgtttttatgtttaaaaagataggattaggaagagaaattgaaaatagagtttttttttagtttgattttaaattaatttgattataggttattatgttttatttttgtttttagagtatattgttatttttagattgtgtttaaagtagttgagttttttagaggagtaagttttatgaatttttttaagatagttttggaagtttcgttttttttggtttattagttgttttttggatattttatagttttaaggaggacgtcgaggaaagtttagaattgggaatttaggaaaaagtttaagtgtgaggaaatttttaggatttaagagtatattttagatttttttttttttatagtcggtttttatttttttaaattttttttttagtttaatgtttgttttgtttttatttatttgagttaggttgatatatttttcggatgtttagttttaataatttagtattgatcggttgtagaatttgttttcgggttgtttttttttttttttttattttttttttgttgttttttttaaaatgtagtcggtatttaagggaatagggatcgagatatttagagtaattttgtggttataaatttttattttttttttttttgtataattaatttcgtaaattattttttttagagtcgtttaagtttttttttttaagttagattttttttaagttttttttttaggtaatatttagttttttttttttaaaagtttaattttttttagtttttttggaaaggaagattgtggttcgttgtggggagtcgagtggttagcggagaattgtggtattttaggtttatcgtttttattagtagtagttcgtttttttttaaagttttgattttcgggtaggcgggaaagtcgggattagcgtttttttttatttttatcgatttgggtcgtagtttcgtggatttagtttttgagaaggttgttggttaagtttgcggatatgatgggttatagatttttcgttcgaggtgtcggtttgtttttttcgtcgttttcggttttcgttgcggttgttggaattggagcgtagtttattttgaagttttgcggggaggggtcggtgacgttagtgttggttagtttttaggggttataagatttttttttttatcggtttgatttttttttattttatttaatttttttcgatgtttagtttttttagatattttatttgggattttttcggatgtgcgtggggggagttatttttttagggagtagtggggacggcgtttcgtgttagttggagggattttttttttttaattttttatttttttttattttttttagatgtagggggggtgggggatttttttcgcgataggtcgcgagggttgacgcggttttacgatttttttttacgatttttagaggtgtagcgggtatatttttttttttagatgtgcggaagttcgagtttcgtttttttttttcgttttcgtattgatttttttttcgttttcgtttgttttgtaattgtttttttttttgttttacgttgaatggtttttttttcggtatggttcggattagttatttggttcgtttttcgtcgagttttcgtcgttttaattgattgtttttcggggtagttttcgtcgtaggggttcgggattttagaggaggcggggttagtaggtgacgttagcgggcgggttcgatagaattatcgtcgcggcggcgatggaaggcggacgggggagatatagttatttttttttaggagcgaggcgagaggatgatgcggggtgggttattggtacgtgagagttagtggtatcgagagggcgtttcggcggcgaggaaggaggcgcgcgtgggaggattaggttaatttcgttacggacgttattaattcgcgttcggaggagggggggcgcgtgttattattattttgcgttttcgggagaatttattatttatttggagggggcggcggagcggagggcggggtttattatttaggggagagggggcgtggatacgttgaggttatattataaagtttcgggtttgattttagtggaaagtcgagattgcgtttaggttgttggattatatcgggggtacggttagaggtttttaggggagggcggcggtttgagagttttgggtgtcgatttgttgggatttaaattttttgtgggaacgatgataaggagtaggtttatagattataagtgtaaaagcgggcgagaagggaaatttaagcgggataaggatttttggggggaggttaaagggtacgaagttgtgtttgtagttgttattatagtaatcgaggatcggatgtggcgattttacggtgcgatagttttttttttaggttttttggttcgagagtttgttgattttgtgatatattttgaggagttggttgtggtgttttttagcgagggaagaaaagagtaatttttttaaagtatttatagaaacgtagtaaagggaaggtgtgaggttgtcgttatgtttggtagagacggagggaggtagttggtttcggaatgcggtcgtcgtagatgtttttcgtaatttttcggaagtggaatggcgggagttttagtattgttgtttatcgatttttcggaagcggaaatagaattttcgcgtgttttttttttattattttttaaatttcgttgtagttattgtcgtagatacgatgtcgaaacgaaagaagtagaattattattagttatcgatatagtagtagttttcgttgttcgagcgggaagagattggagatgaggaggatgggagttttatcggtgaggggtttgggagggatgtgtatatgtttgttaagttcgttcgggtaaggggttaggggttaataaggtgcgaaggagggggttgtaacggaaggaggaagggcgtacgcgttggggagggatggaagtggggtttttttaaatggagttttgaattaggagtttttttattggaattattaattttaatacggttttagatttttttggagaaggcgggggtggagagaataaagagtttttttgcgtagtcgtagaatagtaggggaaaggggtagtagagatgttgtagattgcgatgattgggatgatagtttgtatttagattttgattgaaaaggtataggtgtagttttttttaaattagttttttggttagtagttaaggtgagggattggtttatgtttggagatatttaggttgttttggatagcgacggtacggtgaagaaaaaaagttgttagtatttttttttgtattattttttttgattgaatatttattttttgtaaattttgaaatagttttgtagaaaaaagggtagatagatggggtgagaatttttaagattgttgaaaatatatttgattttattggttgaattaagaaataagtaatataagaaaaatatttaagaatagaattattagttttttaatttattttgatgattatatttttatgtttgtttttaggattatttagttttttgggttttttttttatggttaatggaaaatttggcgattttaagttaggtgaggaggaaggggttttgatttttgtattaggtcgtagagaagatagtaagggaggggataaaatttaggaaggatttaaaaataaaagattagggattttatttttaaatgaatggagagaagttgtatatttgttgatttaaaaatttaatgttgtaaaaatgttatttttttttaaattgataaatagattttatgtattttaagttagaatatttataatgtttttgtggaaatatatattattatagggaaatgtaaaatattaaggcgattattaagataattttgaagtgggagggtttattatgaatattaagatttgtaagttgggtatggtggtatacgtttgtagttttagttatttaggaggttgaggtgcgaggattttttgagtttaggagtttttgaggttattttgggtaatatagtgagattttgtttttaaatataagaagaaaaaaagatttattataaagttataatagttataacgatgtagtttggaaataatgatagatataagttaataggatttatgtttcgaagagtttaataataggtttatatatgtgtggatattttatttatgatgaagatggaattgaaaagttggtttttttaataaatgatattggattaattggatatttatgtgaaaaaaatggaattttattttgtatttataattatatataaagatttattttaaatggattgtagatttaagtataaaaggtaagagaataattattttagaaagtaaatgtattttttaagagtagttaagagtttttaaatagataagaaatgtacgtatatatattaattataaaggaaagattgataaatggaatttcgttagaaaatataaatttgcggttgggtatagtggtttacgtttgtaattttagtattttgggaggtcgaggcgggcgaattacgaggttagtagtttaagattagtttgattaatatggtgaaatttttgtttttattaaaaatataaaaattagtcgggtatggtggtgtgtgtttgtaattttagttattgaggaggttgagataggagaatcgtttgaatttggaaggcggaggttgtagtgagttgagattgtattattgtattttagtttgggggatagagtgagattgttttaaaaaaaagaaaaaataaaatataaatttgttaaataatattattaagaaattaataggaagttatataatagaagatatttgtaataaatataataaataaagattttgtatttataatatataaagaatttttttagataagttatttgaaaaattgataaaaatataggatattttattaaaatggagatttaaatgaattaaaggtttaaatgaataagtatttaatattattaattgttaagtaaatgtaagataaaaatatattattttgaaattagaatttttgtgtattgttgttgggattataaaatggtgaaattattatagaaaataatatgaagaggttttttttaattaaaaatagaattattagatgataaaaaaattaaaaatagaattattttagaatttttgtttttaggtatatattaaaaaaaaaaaaatggaaagtagggttttgagatatttgtagatttatgtttatagtagtagtatttataataataaagaggtggaagtaatttatatgtttattgatggaaggataaatgtggcgtgtatatataatggaatattatttagttttatgaaggaagaaagtgttgttatatattataatatggatgaattttgaggattttatgttaagtaaagatatagtgtattattttatttatttgaggtgtttaaagttaaatttaggggttgggtatggtgttttacgtttgtaattttagtattttgggaggttaaggtaggtagattatttgaggttaggagttcgagaatagtttggttaatatggtaaaattttgtttttattaaaaatagaaaaattagttgggtatggtggtgtatatttgtaattttagttattcgggtagttgaggtatgagaattgtttgaatttgggaggtagaggttgtagtgagtcgagattacgttattgtattttagtttggatgatagagtaagattgttaaaataaaaaataaaaataaagttaattttaaagaaatagtagaatgatggttattagaggttgggggaaggaagttggaggaaggggagttttgtttaatgggtatagagttttagttttgtaagataaaaaatttttggaggtcgggtatggtggttcgtgtttgtaattttagtattttgggaggttaagtcgggcggattatgagattaggaatttaagattagtttggtcgatatggtaaaattttatttttattaaaaatataaaaattagttaggcgtggtggtgggcgtttgtaattttagttatttgggaggttgaggtaggagaattatttgaatttaggaggtagaggttgtagtgagttaagatcgcgttattgtattttagtttgggcgatagagcgagattttattttaaaaaataaataaaaatttggagatttgttttatattaatatgaatatatgtaatattattgaattgtatatttaaaaatagttaagatggtaaattttatgtgttttttattataataaaaattaaataaaataaggtatgatgatttatgtttgtaattttagtattttaggagattaaggtgggaggattatttgagtttaagagtttaagattagtttgggtagtgtggtaagatttaattttttattaaataaataataataattaaataaaaaaataattattattttttatatttattatggtaaaatttaaaaatttaataattttaagtgttgttaaggttataggataattgttggtgagagtgtaaattggtataattattgtgaaaaaaaagtttggtattatgtatgaaatttgagtataatatatattttataagttagtaatatttttattacgtatatatttaatagaaatgtatacgtatgtgtaataatatgtataaaaatgtttatagtggtatttttcgttatagttttaaattggatattatttatatgtttattattagtagaatggataaataaattgttgtgtatgtatgtaatgggattatattgtaacgaaaatgaatgaattgttgttataggtaatttggatgaattttataaatatgatgttgagcgaaaggagttagatataaaagaatgtagattgtatgattttatttttgtgaagtttaaaaataggtaaaaattaatttatggtgttaggatagtggttatttttggggaggagggtgggtaatgggaaaaggggtataaggggaggattttttgaggtgttaataaggttttatttttttatttggtggtggaaatttaagtgtgtttattttgtgagaattgggttgtgtatttaaaattggtgtgtttttatgtatgttgttttttaataaaaaaaatttttttaattacggtttattaggatttagttgtttattagatatttttttgtgtttttttttttttttttttttagttttttatagaggttttttaggattaaggggattattgattttattattgttgagttttttattttttttttggggtagaggtttaattcggagagggtttggttttaggtttagtttatatggtcgtggttggtggggagttaatgtagaattttttttttcggggttaggttatgggggttttattaggggaagtttttataaggaatagagaaattttcgaaggtttaaaagttggttttttattaagaatatttgttcgtttaaggatgatttttaggttatggaaggtgaggtttattttgttatgtttattatttttagagtgatttaatttttagaagattatttataattttttttgggtttttttttttgtttttgaagtagaagtagattttaatgttattttttttaggagaaagattattattttaaaatatttggaaatggtagggggtagaaaattagttttttttttgtttttgcgttttattgtatttgttttttttgttgtttaaatttttaattgttttatttttatttgtttatagataaattcgatcgttttgtttgtcgatattttgttaaaaagggttattgtcgatatgaggatttttgtgttttttattatttaggcgttaatggattttttttgtgagattgtgtttttttatttaggttggaaggagttttttgtgatttagcggttatttatttttttgtagttttatgatggttattgtgaggtttttttaatatttttagttagtgatatatttattttatttattatttttttcgtgtggggtttagagtggtgttgtattattggtgcgcggtatacgcgtttttttttgatttagtttgtagagattcgtttttgggatttatttttgtttttttttagttgttttttggattttttttttcgttattaaatgattgttgaataggaaatttttttggtgttgttttttgtgtatttgtttatttgttttttagtattgtttttaatttttgagagttttggagcggttttttattattttttttttttagttgtttgttttaagttttttttatgtgatattttttatttttaatgttgttagttgtttgtgaaatttagttaggttgtttaatttggggttaagtttgggtgattggtgtagagttattttttaaaaggttattttttttgtttttggattttatagtttttttgttagtagtatgatttttatcgttatggtttatttatgattatcgtgttttgtgaaattgtgtatttttttgtagttttttttagtgttcgtggtatttttgtgattttttagtattagaataagtttttttgttaaaatgagtgaggcgtttggtgttttttggatttttttattttttaatatgggagaattgtgaattttttattagattgtttttttggttttttttattttttttttgttggttattttgagtttgatatagatttatgatatgttttataaagtttttaatggttttattttatttagattttttttagtttattttaattagattatgttattgtgaggttattagtttatttatttgaattttgtgaatttttattttgtttatttttgggtagaagttggatagtattgttgtttttttttaattttttttttttatatttttggtattggttgttttttgtgaaaatagtagtgaataggtttagttttgaattggttttgaggaaatgggttaggagttgtattggtaagagggaggggtgagagttgttggagaattgagaatgaggttttttttttttttttttttttaattttttttatattagtaataaatgtagtggaaattagtattttatttaatttttgtgttttagttatttttggagttgtagatgaagttgtttttatttggtggagttagtttattttttagtttatatatattagtgatggggaatgataaagtttaaggtttttttaggttgaaaaaaattaatggaggttttattagtttgtaggtattaattagaataagttgttttatgtttaagggtaaagttttgtaagaaaaaggaaaggttaggtgttcgtggagttatttttaaatattttattttgtagagtttgtgtttatggagtggtaatgatgaaggagttttttagtagtaatttgtagaatgtttgtgggttaggtaatatattaagtattagagataattgatagttaaagttaatggatttaaaatgtatagggaagataggttttttataattataaatagtatgtaaagttaaatttgttaaaagtgttgggaagaagatagggaagaaaagagggtgaaagagagttgtgtaataaagggagttagggtaggagatgtaattgagataagttttaaaggataaataggaggtggggtgggagagggaagttaaggtaaaggttttcgttaaaagatttaggggaagaggagttaagaaatttagggatagtgggagatgatgtagaagaaagaggagttagattatttagggttttggaaaatatgaagatttggttttttttttagaatagaagtttttgaagaattttagataggagtattatggtttaggttggttttttaaaaaaaattagtttgtatggagagggtttattttggatttggaagttaattagaaggttattggttattttagtagtataagtgagttatgatggtgatatagatttgggtagtagagttggagaaaagtagatatttgaaaattataggttaaaataaaagtattagatttttttaggtagttttggtttatgtaattgttatttaaaaagaagttttaagatagaagtttatggttgggcgcggtggtttacgtttgtaattttagtattttgggaggttaaggtgggtggattacgaggttaggagattaagattattttggttaatatggtgaaattttatttttattaaaaatagaaaaaaaattagttaggcgtggtggtcggcgtttgtagttttagttattcgggaggttgacgtaggagaatggcgtgaatttaggaggcggagtttgtagtgagtcgagatcgtattattgtattttagtatgggcgatagcgtaagattttattttaaaaataaataaataaaaaataaaaataaaaataaataatttttaaaaagatagaagtttattttttttataggttaagaggtggataattaataatttaagatgtgtgataatgttattattataaggtttttgagtatttagaattttaatttttaatttttagatttataattataagtttttatttattgtttaaagtgaagttttggtttttttatttatgtttaaagttttaggatggaggaagggttgagaatattagttgtttgggaagaaatttttttttttttttttttttttttttgagacggagttttagttttgtcgtttaggttggagtgtagtggtatgattttggtttattgtaagtttcgttttttaggtttacgttatttttttgttttagtttttcgagtagttgggattataggcgtttattattatgtttagttaattttttgtgtttttagtagagatggggttttatcgtgttagttaggatggtttcgattttttgatttggtgatttgtttgtttcggttttttaaagtgttgggattataggtgtgagttattacgtttagtcggaagaaattttttaaaagttaatttataattttttaatttatgggtaagtatttaagttgagtttattaattttatagaggttatttttttaaaagggggttaggaatgataggattagggtttgtgtttggtgattttaaaagaaataggaaattgttttggtttagatgttgttagaaagatgattattttttaattttatttagaaggagggagaaatgaaatatggttaaagttgtaaggtaaaaaagttaatatattttagttgatagggaattgtgtggtgtttttgtgtttagataagattttgaagtttgtttaattttattataaatataggatgattttgtttgatattgattttttgtgagatagtttatgtttaataagagtattatggtttaattatgggtaataggttagtttttagtaatattaaagtttgttagttattgttaggttagtttttaatttttagggattgttttttttaaaagtatgtaaatatataattataggttgagatgaattatatgaaggaaataaatggggtattgaatagaaatagtagttggggagttatttaagatatggtggtcgggcgcggtaggttacgtttgtaattttagtattttgggaggttgaggcgggtggatcgtttgaggttaggaattcgagattagtttggttaatatggtgaaattttgtttttattaaaataataataattagcgaggcgtggtggtgggtatttataaataattttagttatttgggaggttgaggtaggagaatggtttgaatttaggaagtagaggttgtagttagtcgagattgtattattgtattttattttgggtaatagagcgagattttatatttaaaaaaaaaaaagatatggtggttaggatagatttttttgaggaatttgtagatgaagggtttagaatttagttttgaggaattttgatattgaattgttaagtgaagaaggataaggataagttagataaggagattaaggagggatgacggagaggtagggagagattttagagtgtggcgttatttggttgtttgtttagtgttaggtattttgttaagttttttatagatattgtttttgttttatttaagttttatatatttttttggggggggagagggggtggtttaagcgatttttttgttttagtttttcgagtagttggaattataggtgtttattattatattcggttaattttttgtattttagtagagatggggttttattatgttggttaggtcggtttcgaatttttgattttaggtgatttatttgtttcggttttttaaagtgttgggattataggtatgagttatcgtatttggttaagttttgtatatttttagtgaatattttagtgtttattgtagggtaagtattgttttaggagttggagttatattaataaaaaggataaaatttttgtttatatggagtttatattgttttgaggatgatagataatatatataggtaatataattttaagtaatagtaaatgttttaaatgaaaataaagtgaaaaaagaggttagagagtgataggtggaagagaataggttgatataaagagagagttgttttgaggaggtaatatatagagagaaaattaaacgagggaataaattatatgaatatatagagaaagtgcgttttaggtatagggaatagtaaaggtaaaggttttgatgtaggaatgattttggggtgtttgaagtaaaaatagaaggttaggttaggcgtggtggtttatgtttgtagttttagtatttttagaggttgaggtaggagtattgtttgagtttagaagtttgagattagtttgggtaatatggtgagattttgtgtttgtaaaaatgtttaaaaagtatttaggtttggtggcgtgtgtttgtagttttagttagttggaggttgaggtgggaggattttttgaggttgtagtgagttatgattatattattatattttagtttgaatgatagattaagattttggtttaaaaaaaaaaaaaaaagtttagtgtggttagattgtgggagatgggattaagatgtttaatagagggtatattgtatagagttttataaattatggtaaagtatttggattttattttggattttatatttttttaaatatttttatattttgaataaatggatttattttttttttttttttttttgagacggagttttgttttattatttaggttggagtgtagtggtatgattttagtttattgtaatttttatttttcgggtttaagtgatttttttgttttagttttttaagtagttgggattataggcgtttattattacgtttggttaatttttgtatttttagtagatatagggtttcgttatgttggttagtttggttttgaatttttgattttttgattcgttcgttttagttttttaaagtgttgggattataggcgtgagttatcgcgattggtttatggatttatattttaaaattatttttgattgtaggtgtgaaggatagattagagaatgagaatgatagtaggtagattagttaggaggttagcgtagtgtagtggtttagggagaagagacgatggtttggttagggtagaggtggagagaagtggttaaatttgggttatgttttcgttttagttgatggtaattatatttttttagttaatttaggttagaaatattggagttatttttaattttatttgttaaatatgatttttaatttattaataaaatttgttggtttttttttaaaatatatttagaaattagttttttttatatttttattgttgttattttagtttgagttattattattttttaatagatttttttgtttttgttatttttgtttattttttgttgtttgtttttttttatttttcgtttaggttgtttttagtatagtttttagagttattttttttatttaataatttaaaaaatgttataggttaggtatggtggtttacgtttttaattttagtattttgggaggtcgaggtaggcggattacgaggttaggagttcgagattagtttgattaatatggtgaaatttcgtttttattaaaaatataaaaatgagttaggtatggtgacgtacgtttgtaattttagttatttaggagattgaggtaggagaattgtttgaatttaggaggtagaggttgtagggagtcgagattacgttattgtattttagtttgggtaatagagtaagattttgttttaaaaaaataaaataaaataaaaattaaaaaattgtattatatacggagataaggggtttcgttatgttgtttgggttggttataaatttttgggtttaggtaatttttttgttttagttttttaaagtattggtattataggtgtgagttattgtatttggttaggttatttttttatttattttattttatttttttttttttgagacggagtttcgttttgtcgtttaatttggagtgtagtggcgggatttcggtttattgtaagttttgttttttgggtttatgttatttttttattttagtttttttagtagttgggattataggcgttcgttatttcgtttagttaatttttttgtatttttagtagagatggggttttattatgttagttaggatggttttaattttttgatttcgtgatttatttatttaggatttttaaagtgttggtattataggtatgagttatcgcgttttagtttaggttatttttttaaaatgtaggttggattatattattttgtttagaattttgtagtgatttttatttaaattaatagaagaagttaaaatttttaagataatttaaaagattttttttaatttagattttgttttatttttttttttattttttttataattttggtttattcgtgttattttagttttttttgttttttttttgtttgttttttatgtatgttcgaatatttttgttatagggttttattttagttgttttttatgttagaaaggttttttttttggaaatttatgtggttaaaattaattttttttaatgatttgtttgaattttattttattgaggttttatttaagattaaaatttgtttttttgatatttttaaatttgatttatatttttttttatttataggattattttttttgttggaaatttaattagagatttttattttatttagtagtattttaagagcgtagaagagtgtttggtatatattatatatttaataaatatatttgttgaatagatgaatgaaaaaatgaggtagatttagttggttgatggattgattaggggaggaggaatggagaaagaggatgatgattttttagttttggtttaaataattgaatgatttgtggtgtaattttttgatggggaagtttggaagagataggttttaggagtaagaataagagttttattttgtacgtatgagagagatttattaaagattttagagaagatgttttataagtagttgaatttatgagtttggagttcggggtagaagttgggggttagtaagagaagtttgggaatttttattggttatagatggtatttaaagttaggaggtgataggtgataagtttagattaaggagagtgttaaagatttagttttgaggtattttaatatttagattttaggagaagtttattagatgtaaaggaaatttatagagagtagtgtttttgaagaaaataaaggagggagggagcgattaagtttattaaatattgatgggagagtgagtaggatggttttagatttgttgattttggtaagtgtgaatttagataatggtggtaataaaagtatgattgtagtggtttgagagttgatagaattataggagtattttgtttaagtttttatattaagtggtagagttagaagtgaattaaagttttgattgtggtgatagtttattgggtttatgtaggttaaaatttatttaagtgatattttgtagtttattttgggtgttattttattttgtgtatagtttattgtatgttaattatattttagtaaagttgttattaaaaaaaataaatgaatcgaagttttattgtatcgtgatttttgtatgttgggttttagttttttgtttataattgtatatttcgggattttgtgatatattttaatattggatcgattagattttttttttagttattggtttgtattgttttttttgtttatgatttagttagtttcgcgttttatgatttttttttaaaatacgcgtagttttttttttttttttttttttttcgtgttttttttgtttattagttttatttgatgggttcgtgtttttttcgttttcgatttattcgggtttcggtagttgttgtttgggcgttttcggtatcgcggtggtagaattagaaacgagttatagatagaaattagaatatgttttttaaaaaaataaaaaataaaataaataaaaaaatagtatgttttaatttttttatattagtaggaaattattatgtttattttttgagtttcgcggcgtcgggaggttacggcgttaggttttttagatagtcgtaaacgttatgtgtttacgcgattggagtaagcggacgtcggtttcgtttcgttattgtaggttacgtttttattgaattagggttacgttttcgagatggcggcgaagttcgtacgtgcgtagttcgggggcggggttggtcgcgttagtttggagagttagttttatcggggtttttcgtcgtcggaagcggaaatagtatcgggcgtcgttatagtagttgtaattgttatcgcgatgtcgaaggcgtttaagtagtagtcgtcggagttcgagtggatcggggacggagagagtacgagtttattaggtgaggttggtaggtaaggaagaaacgagtagagggggaagagagaggagattgcgcgtgttttaagagagggttatggggtacgagattgatcgggttcgtgcgggagttattgcgtatgcgtgtcgtgggttcgggaggagtttgtcggggaggagtgggtttggaatcggggttaaaggaaagagatttagatgtcgtacgtgatttaagtgagattgggcgagataaaagaaagagtatatggtatcgagggagagatggggagaaatgggaaaattttgtttaaaaaatttggatattcgttttattatatattgtattttattaggaatatatgagttttgtttcgatttttttttttttttgcgcgcgtatatatatattttgggagtttgtgattttttttgttttttaagagagggtgatttttttatggttttttttttaagatattttttttatttaattggagtaagagtgtagatttttgatgttggaatgagggttaaggtttatttaaaaagtagcgaaagtttgttaagcgtttgtttttaattaagtattttatatattgtgttttgagaggggaaggaaaaaaatatgaagatatttttttagggttgaagttagttttaagggggatataaatggatataattaattttagtaggtatatagtaattaattttaaaagtatttattggatgtttattgtatattaggtattgtgtggaggaagtgggaatgtagagataaaagataagatttttttttaagggataatttagtatggtgaagggttagagtattaattagatagatagtggttgttagagtatgatgaaggtgtttaagaatgttatgggattgtagaagagaggaggagtatttatttagataggtaagggagtgttagtaaagttttttaagaatatgtaatagttgagtatttttttttgaggtatattgtagttttattatttaggttggagtgtagtggtatgaatatggtttattgtagtttttattttttgggtttaaaggatttttttgttttagttttttaagtagttgagattattggtatgtattattatattttatttttaaaattttttgtagatataagatttggttatgttgtttaggttggttttaaatttttgggtttaagtaatttttttgttttagtttttaaaagtgttgggattataggcgtgagttattatatttgttttttagagtttatttttgaaagattatcgtgaattagtaaggggaagcgtattttaagttaaggaagtttgtggaaggtagagatgtaggtaagtttgattggttttattagagtttggtgattagtgtgatgaagttagaaagatgtttaggagatagataatgaaaggttttagatgttatttcgaggagtttaattttaaagatattaagaaggaaggtttattgaagtgtataaggaatgattatgaatagtttatttgtagtattgagtaatggagaatgaatggttttgaattggttaagatggaggcggggagattatttagggggttttggttatgatttaggtgagaagtggtaaggggataagttaaggtttgaagaataaagagttattaaggaggcggtattgatcggaattgagaattgattaaatgaagggagaagtaaggttgatatttaagtaatttagtgattagtagattattaattgaaagtagtaatggataggagagtaagaagtggaaagagataaggtgaatttttgaatgttgagttaggcgtttttgaggatttttaaaaggaaatggtaagaagagagtttgtttagttattgtggagagataattatattaggagtaaagatataggtaagtatagttgaagtgttggatatggaagagttttttagagagtgtttgtagattgaattaaaaagaaggttaaaggtgggaattttaaagaattttagtaattgtaggaagtaggtggggaaggaggttgaagagatgagattgagaaaggtaaatagttagagaaattggaggtaaattaggagtgagtaagattttagaaattaaataatgatagaagagaataaaaaaggtgtggaggtaggtagtatggaatgttgtagagaagttaggtaaaataaggattaaaaaatattttgtggtttgaggagttaagggtttagtggtaattttggtagaagtagtgtttattcggagatgatattagattgtagtatgttttaaaggtatgggagaagagaaagtgaagtttgtgaattacgattttgagatttaatgaggataagaatacgaaatagtaatgggggagaggggtataagggtaaagaaggtttgtttttttgttttgaaggagtagtttaagcgatatacgaaaggagagaagatatagtatatttttagttatatttaattttttttagttttttggggattatatttttttataatgaaattttttagaggttttttttgtttttataatgaagtggataagagtgattaaagtataaaagatttttttggttttggtgggttttttttttttgtgacggagttttattttaggttggagtgtagtggcgcgattttagtttattgtagttttaatcgtaggtttaagttatttttttttgtagttgggattataggtatatatcgttatgtttggtttattttttgtttgtttttgttttttgttttttgtagagatgaggttttgttatgttgtttaggttaattttgaatttttggttttaattagtttttttattttggtttttaaaatgttgggattataggcgtgagttagtgtgtttggttataaaagagatttaaaggaaggagagatggtatggttgtgttagtttttggggagaaattagtgtttgggatgagttagttatttgtgttgataaggtgagttgattaggttttttttttttaggtattttagtagatttttttttttaatgtttttaggattaaattttttggaatagtatataaagttttttattattaattttgtataattttttaatttttatattagttatttaatattgggtttagattttttttttttaatttttttgtttgttttttgtggtttgttttttggggaggaggagggttttaaattttgaaatgtgttttggatggaggatgtagattaagtaaagatagatataagcgtgtttgggattttataaaggaatagaaagaagttagtatcgagattagaggtgtgggtagggaaatagaaaagatagggtagggttattttagtttgtgaagtttttaattattggaattgtttttcgttaattttagttttttggagaagtagatgtatataaaatttttttgaataaatgattattttgaaatatatggaattttagtttgagaatattttaatgtagtagatggcggatattattgatttttttttttttttttttttttttttgagatagtttcgttgtgttatttaggttggagtgtagtggcgcgattttggtttattgtaatttttattttttaggtataagcggtttttttgttttagttttttaagtagttgggattatatgcgtgttttattacgtttagttaatttttgtatttttagtagagatggggttttattatgttggttaagttggttttaattttttgattttgtgatttatttattttggttttttaatgtgttgagattataggtttgagtcgtcgtattcgattaattttttttttttaatattaaatattgaaatgtttaagggtagaattagatagtagtgaatggaagggatgttttggaagagaagataataaataggtttaagtttgaagggaaattatgaggttgtttttagtaggggagggagttggatatggttttttatttttagggaaataaggatggagagggggagagttagaatttgttgaatttgttttggttttattgggaatataggttaaatagttttttaggttattttttagaatgaaagtatatagataggtaaatatgatataatgtgatttgtgttataatatttaagtagaataagtaaggtatagattgaggtgtttatttgtttattagataattttatttatatggtttataggttttataaataacgtgtttttttggttaggtatagtggtttaggtttataattttaatagtttgggaagttgaggtaggagaattgtttgaggttagaggtttaggattagtttgagtaatatagtgagattttttttttaaaaattattatttttttaattaggtaggtatggtggcgtttgtttgtagttttagttatttaggaggttaaagtgggaggattatttaagtttaggaatttaaggttatagtgagttatgattatgttattgtattttagtttgggtgatagagtaagattttgttttttaaaaaaaaaaaaaaaaaaaggagggtgtgtgtgtgttgtatatatgtgtgtgtatttatatatattttttaaattgaatttataatattttttttttttttataagatttttttttttattgtttttttaattaataaatggtattatttagtttagttaattttgttagttaaaaatataggagttatttttgagtgtttttttttttttttttttttttttttttttgagatagagttttgttttgttatttaggttgtagtataatagcgtgattttagtttattgtaattttcgttttttgggtttaagtaatttttttgttttagttttttgagtagttgggattataggcgttcgttattatgtttggttaattttttgtatttttagtagagattgggttttattatgtttattagattagttttgaatttttgattttaagtgattcgtttgtttttgttttataaagtgtcgggattataggtatgagttatcgcgttcggtcgggtgttttttattttttatttttagttttattttatgaatttttttttatgttcgtttgttattattatttagattattttgatagtttttttagtggattttttattatgtttatttttttcgatttttgttgtattttgaagttagagtgaaattttaaagtgtgaaagtgattatattaataaagtttttattttttaattttgttataaggtttttattttagttttattttgtattattttttttttagtttgtaagtttagttatattaaatttttttttgttttttagtgtgtgtgtttttttatagttgggtttgtgtatagtattggaattatattatgtgtttgattaattttttatattttttattattttagttatttgtttaaatgttatttttttagagaggtcgttattagagatgaagttagttttttttttattattaagtaggttttatttttttttttggaatttttagtatatttggaattatttatttaaaaatttttttttttatagtttgtaagttttagaggagattatatttgttttgtttattgttataattttttacgttagtataatatttgatatatggtagttgtttagtagatatttagtggatgaatgaatagagatgggaatgattatttttgtaggagttgtgagatagtataaatatttaaggagtgatagttaagttagaaaaataataaaataggatagaggttatagagatttttgtaggggggattagattgttttggaatttgtagataagtatttacgatgttcgtttaattttttagataaagtggtgaagaaagggaagaaggataagaagattaaaaaaacggtgagaaaatgagggttgaggataagaaatgattatggatgtttttaagttaaataaatagttatgtgaaggaggtgggaggtttaagggaggagaaaagattttgttaagagaggagataggtagggtacggtggtttatatttgtaattttagcgtttagggaggtagaggtgggaggatagtttaagtttaggaatttgagatttgtatattttattttttataaaaagaaaaaaaagagagagataggaggtaaggtgagggtggagtggagggttagtgggttaatgtgtggtagagtatagtttgtttggattgtttttggaaatatgtttatttgtagtttaattttttttatagttttttgaagagttggtagtagaagataaataggttggggaagaagagaaagtgtttaaggagaaggagtagtagtagtagtaatagtaatagtaggtataagtgttatagggtttattaattttgggaggtatttgggttttattaatttttttttagtttatgttgttttatttagttgatggggaattttttgtgaggtagaaatatagtaggggtttgggttttatttttttattgtttttttgtttttagtagtaaaaaaaaaagcgagatattcgaaaaggtaggcggaagaaggatgtggatgatgatggagaagagaaagagtttatggagcgttttaagaagtttttagtgttaattagtgatgaggaggatgaaggtaaatgatttgagggggaatgggtatttggaatttatgagttatggagagtgatattttatattttgatttttaagttggatttaattggggggttagatattgtaatttttttttattttatgttttttttttgttattttagtattcgttttaaaatttcgcggagggaagaaaattaaggtaagttatttgtgtggtaaacggagattttaaggatgtaattttgattattttattgatttttgtggtttttttattttttagggtggtaatgtttttgtagttttgatttaggattagagtgaggaagaggaggaggaagaaaaatatttttttaagtttgttaagtcggagaagaatcggattaataaggtgatagtggtggttcgattagttatttttattttatttaatattttttggttatggtggagtaatttttcgtttttaaattagtttttttcggtttgttttatttatattgttaaaattatttttttagaatatatgtttaggttgggtatagtgggttacgtttgtaattttagtattttgggaggtcgaggtgggcgaattacgaggttaagagatcgagattagtttgattaatatggcgaaattttatttttattaaaaatataaaaattagttaggcgtggtggcgtgcgtttgtaattttagttatttggaaggttgaggtaggagaattatttgaatttgggaggtggaatttgtagtgagttgagattgaggtattgtattttagtttgggtaatagagtaagatttagttttaaaaaaaaaataataaaaaaaattatgttatttttattatttagaaatttatagtgattttgttgttttaagtatagaatttgaaataaagttttaggtttttgtttttttatttgtgatttttttgcgtgtgtattttagtttatgtttatttgagtttttgagaaagtttttagtgttagtgttatttattttggtggcgtatttgtttgatttataatttttagttttgttgacgttttttagttattttttcgttatttagtttgaagttggagggtagggtttttttgggttttatttttcgttagtagtatttaatatagatggtttttaatttttgtttcggtgtacgatttttttattttatgatggtgtgaaagttatatttatttagggtattttttaatttatgatgggattatatttagataaatttattataagttggaattatttttttttttttttttttttgagacggagttttattttgttgttaagttggagtgtagtggcgtaattttggtttattgtaattttcgtttttcgggtttaagtgatttttttgttttagttttttgagtagttgagattataggtacgtgttattacgtttagttaatttttgtgtttttagtagagatagggttttattatgttgattaggatggtttcgattttttgattttgtgatttatttgttttggttttttaaagtgttgggattataggtgtgagttattacgttcggttaagaattattattttttatttaagtttttggtgggtttatcgggatgtaatttgtcgtaaatggaggagtatgtgtatggttaatatagtagattttttagaaatgtttattatatagtaaagtagtataataatttgtatgtatgtgtgtaatgtgtatgtgtgttttttttaggtcgtatttgaggaatagtagtttgtatttaagggtaaaaagggaaaggaagagaagttaaaagggaaggttaaggtgagagagtaattagtaggaggaggtattggggtttaggaattaaaatattttattagggttgggcgcggtggtttacgtttgtaattttagtattttgggaggtcgaggtgggcggattacgaggttaggagatcgagattattttggtaatacggtaaaatttcgtttttattaaaaatataaaaaaaattagtcgggcgtggtggcgggcgtttgtagttttagttattcgggaggttgaggtaggagaatggcgtgaattcgggaggtggagtttgtagtgagtcgagattgcgttattgtattttagtttgggtgatagagcgagatttcgttttaaaaaaaaaaaaagaaaaaaaaaaaaatattttattagatttgttttttttttattagttttaaaataaattcgttgttttggataatgaagaggaggataaagaagaagaaattataaaggaaaaggagttttttaaataagggaaggagaaggttaagaaggtagagtaggtgtgtatttggtgttggggtaaggtggaatgagggattagggtttttagggtttttatgggagagttagaatttggggatatagttattattttagtaaatttttatttttttttttttttgggggagtagttggggtggtggttcgtttgtttttgtttttgtttttgtttatataggattttattttgttatttaggttggagtgtagtggtgtgaatacggtttattgaagttttaattttttgggtttaatagatttttttgttttagtttattgagtagttgggattataagtgtgtattattatttttggttaatttttttatttttagtatagagatgaggttttattatgttgtttaggttggttttgaatttttgggtttaagtagttttttttttttagttttttaaaatgttgggtttataggtgtgagttagtatgttagttagtaaattttttttataaagggttatatagtaaatgtttttggttttgtaggttatatataatttttattatatatttttttttttttttaataattttttgaaaatataaaaattatttttataaagtttaggagttatataaaaataaatgttaggttagttttggtttatgggttgtagtttgtaatatttaatttagtgaagaaagggtttggaatttattttagatgatttgggttttggttttgtttttattggttgtgtgattttgaatatatttttttatttttttgggttttatttgttttttttgtgtgatagaaggaggagttcggagatttttagggtttttatgcgtttggtattttttaattttgtgattttgttggatttttttgattgtgtattagagttttttgatttttttttttttttttttttttttgagatggagttttatttcgttgtttaggttggagtgcggtggcgtaattttagtttattgtaatttttgtttttcgggtttaagtaatttttttgttttagtttttcgagtagttgggattataggtacgtgttattatgatcggttgattttttgtgtttttagtagagataggattttattatgttagttaggatggttttgattttttgattttgtgatttgtttattttggttttttaaagtgttgggattatagatatgagttatcgtgttcggacggttatttgattttttttttgtatgttaataaggaaattatagaaatttattttatataaatgaaatttttgaaatttatttattttatttttagttatattgtattgggagttatatttatagggatataacgcgttgttatattttataaatatatatttatattatttgttttgtattatttttggtagtagaaattaataaaggattttagggagattaggggttgggtatgagaatgagagaggattttaagatattttaggattttgagtagtgaaggaaagagttggggtagggatagggggtagatgatgtgaaatttgagttttagaaggagtttttagtttttttttgttgtttttttttttgagacggagttttgttttgttatttaggttggagtgtagtggtacgatttcggtttattgtaagtttttttttttaggtttatattatttttttgttttagtttttcgagtagttgggattataggcgttcgttattacgttcggttaattttttgtatttttagtagagatggggttttattatgttagttaggatggttttgattttttgattttgggatttgttcgttttggttttttaaagtgttgggattataggtgtgagttatcgcgtttagttaggagtttttagttttgattattttcgggtttttatagggtttagaggaagaaggagaaggggaagaagaggaggaggaaggaggagagtttaaggtagatgatttttatgtttattttagtaaaaaggagaagaaaaagttgaaaaaataggtaagattttggtttttagcggttaaaagtaggggatttttaaatattttaattaggggatatgcgattggggatacgaaggaaaggtttgggggttattttaagtaaaataatcggagtaagaaaataattgtgttttgtgaattttattttaatgtttgatgatatgggttgttttattttggggttttttgtttattttttgagatagggttttatattgttatttaggttggagtgtaatgacgtgatttttgtttattgtagttttaatttattaggtttaagtgatttttttattttagtttttcgaatagttgagattatgggtggtattattatgtttggttaatttttgtattttttgtagagatagtattttagtatgttggttaggttggttttaaatttttgagtttaagagatttatttattttagttttttagagtgttgggattataggcgtgagttagtatgtttagttagtatgggttgttttatggtgatgggaaattggtagattgtggttttaaatgtagttttttttatttttttagatggagtatgagcgttaagtggttttattaaaagtagttaatgtagttgaaaatgattttttcgtgttttaggcggagatgttttttcgttaagttatgttagaaaatgtatttgatattaaggtaaggttttaaggggttttttttagtttatttatttagggaagagttagtttttttattttttttgagtggttgtggtgtgtgaatgggttagtttagtgggaagaaagattggaggtattttttatattttaggttttgttaatttgagtaagaagatagaaaaattagtagaagtggggtttatttttggtagaaaatagtgtgggatagattagattagttgaggatgtatggggtttttattataggtagcgaatagggcggggatcggttgtggggagaggaaggggattatgttggaggtagcggtttgttaggggtttttttgtagggagaaagtggtcgtttttgttttaaagggagaatttttatgtgattattttttttttttgttattttttttttgatggttgtagttggagaagtttagtattttcgtttatggtaaggagttgttcgttaatgtagatttgtatattgtagtcggtcgtcgttacgggttggtaggatttaatgggtgagaagaggagggagttggaggtaaaaaagggtttggagggaaaagaagagattttttagtggtggttaggttttaatagtttttattttttagtaagggtaagattatattttttaagtatattgttaatcgagttttgagtattttttttaatattgatgtgttgttgtgtgagtagggtgagattattggggagaaaaggggtttggtggggtgggtagttgggtagaaaagttagttagttaagaatagaagaaattgtggttatggagttggaagggatgtggagggagattggagatcgggaaagggatgttaaggaaaggaggggagggttaatgaggaatttgagagtgttttatttggaataagtataaagagttgggtagggttaggtaaaatagaaatgtaattgaagggaaagaaagatgagatttttggtttttgaggttgtttgattgttttttttttgttttttagaggtggtagtagatgagatattagtagtttaggttgtttttcgagttgatattaagcgattgaagttgttggaagaggagcggcggttttagggatagttggaataaggggatgatatagttgttgagaggttagagaaggtagaggagatggcgtaggggatacgggtaaagatttgggggtttttgggatttttagacgtgtgtttttttttttttttttttaggtgtatgaggaattgcgggttattggggcggtagttgtagaggttaaagtacggcggattttggttggtttgggttttgattttgaaatgtagaatcgatttatatagaagtttttagggggttggcgtatgcgtgtttttttggttaggtgggttatttattttattgtttttttttttagttttagattatcggggttttttttttttttttttttttatttttttaaggttaatagggaggtttaaggtttatttttttttttttattatttgtgttgtgagaatttagggtttttttttatttttttttttatttggtggtgagtttttattaatatattttgtagttgggtgtaatgggttacgtttgtaattttagtattttggaaggtagaggtaggaggattattttgaatttaggagtttgagattagtttgggtaatatagtgagattttatttttataaaagggggaagaaaatatattttagtttgggtaatatagggagattttgtttttataaaaaatttaaagattagttggatatggtggcgtacgttgtggttatagttattttggaggttgaagtagaagtattatttagatttgggagatttagattatagtgagtttttattgtgttattgtacgatagtttgggtaatagggcgagattttgttttaaaaaaattaaatcgtattttgttcgagaatttttttgaggagagtttgggaaggagtgtttatggttttaggttttattttcgagttttttttggggttgtttgagtaaggatttttttttttttgattttgttttttgttatttattttttagggtattgtttatggagtttatattgttgatgttggatgagtttattaattatttggattttaacgttgttatttggtttaataagtgcgttacggtttttgtattattggtttttattttgtatttttttttttttttttttttgttttgtttttttttagtttttttttattgtgtttgtgagtggagttttatttagattttttttttttttttagttttcgttgtttgtttgttttttttgaatttttttttatttgattattgtgatatttatattttgttttttgaaatttagttatttttagggttggcggaagattttgttgatcgttttttatgattagggttttttggatgatgtttgtattgatattatttatttcgatgtttagcggttttattattataggggtaattatagtaagtaggattgtgtgtggatgtagggaagagatagaatttcgaaaagaggtttgagtgggagggtttatttagataaattgaattttgttagaattttagatagtgatgtttattttattattattagtttttggttgtttttttgttgggaagaggagtaattattgatgtttggtttttttttttgttttagtgatttttaaaaagatgtattagtagaagtagaaagaattgttgaaatagtatgagaagtaagagaaaaagttgaaggagttgaaggtaggcgggaagtttattaagtaggcggtgagtatttgagggatttttgggttgggggttattgtttttttttggtagtggaggaagaaggagattttggaacgttggtttatattttaaggattgtcgtgtagggtttaggtttttttttttttttttttttttttaggaaaaataaacgaaggaagttttgattcggaagtagtagaaatgtcgacggaaaaattaagatgaggaattttaggaggtttttgagtttttgaagcgttttaaggagtatattgtgcgttttatttttttagattttttattatttagttttttagtgttgggtttgtatggtgagtgtcgcgggtttttgttgttttataggaagtatcggaagtatgtatgtgtattttaaattttttattaaggttgagattgtttttgttttttaaggttagtatatgagagggattttgtagggattgaaaagaatataaattgttttttttcgtggtttttaggtgtgatattcggttattagggatagaaattattttttaagaatttggattttggtatcgatatggatttaaggagtgagttggcggggttgttttagggatgtgtagtaggagttatagggagagtttttggggatttttttgattatttgttttttattttgtagtttgtattgtgggttttaatggtgtggggaagagtacgttatttttgttgttgattggtaagttgatatcggtgagttttggagttaaggagggagagtatgagaaatgtgaagatatagttgtttttgttagaagttggaattagggagtttttcgagaatgtagagttaaatatagaatttatgatagatgatttatttttttaagaggggtagtagaggaggaaagagtttagattagtttaggggggagagttaagagaattaagatagaattagggggtatatttacgtgttttggttatataagaaatatatgttttttatagaacgattaaaaattgtataaacgggttaggtatagtagtttatttttataattttagtagggattatttaaggttaagagttttagattagtttagttaatatagtgaatttcgtttttattaaaaatataaaaattagtcgtgtgcggtggcgcgtatttatattttagttatttaggaggttgaggtagaattgttggaatttgggaggcgggggttgtagtgagttgagattgtattattgtattttagtttgggtaatagagcgagattttattttaaaaaaaaaaaaaaaattggtttggcgtggtggtttacgtttataattttaattttttgggggaggttgaggtaggtagattatttgagtttaggagttaaaaattagtttgagtttagtgtggtggtttatatttgtaattttaatattttgggaagtcgaggtgggagattatttgaggttaggagtttgagattaatatgaagaaattttatttttattaaaaatataaaattagttagacgtggttgtatatgtttgtaattttagttattttgggaggttgaggtaggagaattatttgaatttaggaggtagaggttgtagtgagttgagattgcgttattgtattttagtttgggtaataagagtaaaatttcgtttaaaaaaaaaaaatagattagtttgagtaatatggtgaaattttatttttattaaaaatataaaaattagttgggtatgttggtgtacgattgtagttttagttattcgggaggttgaggtaggagaattgtttgagtttagggggtagaggttttagttagtcgaggtcgtgttattgtattttagtttaagtgatagagtgaggttttgttaaaaaaaaaaaaaaaatgtttaagagaaaaatttggagataattagttttttttttttgttattttgttttgagacggagttttattgtcgtttagtttggagtgtagtggtgcgattttggtttattgtaatttttattttttaggtttaagatatttttttgttttagttttttgaatagttgggattataggtacgttttattatgtttagttattttttgtatttttagtagagatagggttttattatgttggttaggttggtttcgaatttttgattttgtgattcgttcgttttagttttttaaagtgttgggattataggcgtgagtatcgtttttagttgagataattagtattaatgttttagtggatatttttttttttttttttttgtaaatgtgtatataatttttaataaaaatgggttgttatatgagttgttgtgtagttagatttttttaaatatattaagtatttttttatgtaattatttattttatatgagtttattttttttttttgagatagagttttattttgttatttaggttggagtgtagtggtatagttttggtttattgtaattttcgttttttgggtttacgcgatttttttgttttagtttttcgagtagttgggataataggcgcgtgttattacgtttagttaattttttgtatttttagtagagatggttttatcgtgttagttaggatggttttgattttttgattttatgatttgtttgcgtcggttttttagagtgttgggattataggtgtgagttattacgttcggtaaattttattattttatttgaatttttgtaatatattgttatttagtgtgttagaaagtttgtagttatttttgttttttttagtagtgttgagaggttatttttttatatttagagattagatttttagaaaggtattattagattttttttaaaatattaaatttgttatatgaggtttttacgatgtattattcgtgagtttcgttgtatggagagtaggtgttttttggttgtggttagttttttttgtttgttttttttgttttttattttgtttaattttttttttgttttttaatttttttattttgtttattatgtttttgttatattaggggaatatttttgtttttttttttttttgagataaagtttttttttgttttcgagggtggagtgtagtggtgcgattttagtaatttttattttttgggttaaaattatttttgtgttttagttttttgagtagttgggattataggtatgttttattatgtttagttaattattgtatttttagtagagatagggttttataatgttggttagtttggttttaaatttttgattttaagtgttttttgatttgttttttttggttttttaaagtgttgagattataggtatgagttatcgtgtttagtttttatttttttttttatgtatatttgtttttggtttatttttggtgtttgttttttttttagaaaagttggtgtatggacgaggttaggagatcgagattattttggttaatatggtgaaatttcgtttttattaaaaatataaaaaattagtcgggtgtggtggtaggtatttgtatttttagttattggggaggttgaggtaggagaatggcgtgaattcggaaggtggaggttgtagtgagtcgagatcgcgttattgtattttagtttgggggatagagcgagatttcgttttaaaaaaaaaaaaaaaaagttgatgtatggagttgtagtattttttttttttgttttttttttaattattttgtttttttttgtagatttatggggaaatgagaaagaattatcggttggtaagttggtattgggatttagggaatgataatttgatggaggaagtgtgattttaatcgattattttttttttttttcgggtagaaaattggtttttttaattagtagtatgtagagtagttgcgtatggaggagacgtttattgagtatttgtagcggggttttaatttgttttattaggatgttcgtaagtgtttgggtcgtttcggtttggagagttacgtttatattatttagatttgtaaattttttggtattattttaggggttagggagggtgttttttattttattatttatgtttataaattgtatttagaggaatcgagaatgagggagttttagtttataaattggtatattttgagggtttgtttttagaatgtgaggtgttaggtgtgatagtttttttttttttttgttataggtggttagaaggcgcgagttgtgtttgttgagttggtttgtcgggaatttgatgtttttattttggtgagtgagttgggttgtgggaaaagggataagggtaatagtaatggaagacgggagttgtagtgtttagttatggaattttttttatgtaggacgagttaattaataatttggatatagagtttattgatgttttaggggaggttattaatgaatataagggtggtaagttagttgagagtgtgtttttatttttgttttatggggattaagttgtagtgttttttattatagaagggtttaggatttttttattttatgttttgattttttttttttttttttttttttgttttttgttgttgttatttttttttaaagttgtgatcgttgttagttatgatgttcgatttattatagaaattaattgttagttgtgggtggtggaggagtagagtgttagttaaatcgatggtgattttgaagattataagcgggaggtgttggaggttttgggtgaagttatggttagtcggtttcgagagtgaagtttttttttttagaagtttttcgagagatatatttgtgtggtttagaagttttttgtggtttttttttttttgaagattgtttttggtttgtagttgatttggtaattatttaggtatatgaaggtggagtgtgattttgatgtgatcgggattttattttgattgtatttatttttttgaaagatttgtttgttttgtttttttttatataattgagttggttttatttttggtatttttttaaataaataagaggtgattattttattgtgaggttttatttagttaagtttatgtggtttattgttttaggatttttattatttagaagtttgtttttgatttattttatagttttaggtttagttgttttttagtttttgggtggtgttgtttttttttggtggatttaatgttgatttattggtataaatagttgttgaagtttagagttggaggtgagtttttgaggtttttgttattatttagtttaagatttggtgtttgtagttttttgtttggttgaggatttggggtaggaaaggaatgttgttgaatttgaatttttttttataaggggaagaaataaaggaaaggagttgttgtcgatttgttattgtttggagattgatgggagttggaattgtttttagttttgatttgttttatttagttttttagtagtttttaatagtttttttttttttattaaatggattttgtttgtagttttgttgatagtgtttgttgtttaaggattataggattttttttttttaattttttacgtaaggaaaaagtaaagtgatttatattttttattttggaatatgggttttttttttttttttttttttttttttttttttgatagaattttgtttttttatttaggttggagtgtagtggtatgattttggtttattgtagtttttattttttgggtttaagtaatttttttgttttagtttttcgagtagttgggattataggtatatattattaggtttagttaattttagtgtttttaatagagatagggttttattatgttggttaggttggtttcgaatttttgattttaagtaatttatttattttgattttttaaagtgttgggattatagggatgagttattgtgtttaattttttttttttttttttttttgagatagggttttgttgtgttgtttaggttagagtgtattgtatttttaattttttgggtttaagtaatttttttattttagttttttgagtagttgggattataggtatgtgtcgttatatttaattaatttttttttttttaatttttagtagagatagtgttttgttatgttgtttaaggttggttttgaatttttgattttaggtagtttttttatttcgattttttaaagtgttggggtgttgggattatagacgtgagttacgacgtttagttagaatttgggttttattgtttaagttaattttatgaatgaggaggtgttttgttttgtggttagggattagggtattgatttttttaaaaattattaaattatttagttaaaatgtacggtattgtggggtatataagaagggaagagataagatttgtttttattaatagtttggttagagaagatttaaaagtaagtatgaatagataattaatttgattaattgtttaatatgtcgtattttagattttaagttgttatatatttaaaaaagggaaagattatttagggtttgattatttgatagggttatttgagggtagattttgaaaaatgatgatttgattaattagggattagggagttattttttagaagtaggaaaagagtagattttaggtttggggggaagaataagttatttgggagttaatggatgatagttgttgtggttattttttttaagagttagattggggagatgggtttggaaagtaaaatgtaaatggtgggtagtggtattaggtggtgatgtgtaaggcgtgttgtagaaatttgtagggtgaagtttataatttttgttacgggaatggggtaattgaattttaaattagttaggggagatagggatggaaagagtagatgtggaggttggggagaagggagtgataggagatatatttagttttagagggaatagggagagttgtgtggttaagatttaattgtttggatatttaatttggggaaattgttttttagttaagtgaataaataatattggattttaagtataagttttatataggaagtgaagttttggtgtggagatagttgtatagttagggaatattttaaattaaaaataaggaggtcgggtatggtggtttatgtttgtaattttagtattttgggaggcgggtagattatgagattaggagttcgagagtattttgattaatatattgaaattttatttttattaaaaatataaaaaaattagtcgagcgtggtggtgtatatttgtagttttagttatttaggaggttgaggtaggagaattgtttgaattcgggaggtagtggttgtagtgagtcgaggttgcgttattgtattttagtttgagtaatagagcgagattttgttttaaataaaaattaaaagatattaggaaatatgttttttatggaatttgagggggaaaagttagggttttggtagtgattttggataagttattagttttttgatatttttttttttatttgtaaaatgaaggtggtagttatttattttatagggttattaggggatttaatgtgtaataatacgtaaagtgttttaaattttgttgtttttgttatatgtattttatattatatatatatatatatatatattttttttttttttttgagatggagttttattttgttgttaggttggagtgttgtggcgtgattttggtttattgtaatttttgttttttgggtttaagtaattttgttgttttatttttttaagtagttgagattataggtacgtgttattacgttcggttaagttttgtatttttggtagagattaggttttgttatgttggttagtttggttttaaatttttgattttaggtgatttgtttatttcggttttttaaagtgttgggattataggcgtgagttatcgtatttggtttatatttttgtatttttaagtttttatttcgttagtttagttgagatgatatataaaatatataggaatgttatttataaagtgaatattagtttgtattttaaatatttggttattaattttattattttaaatataagtgagaaaagtattttaagtattttaaaataatttttcgttataggtataaattttatttttttttttgttttttttttttttttttttttttaaagatgaggttttgttatattgtttaggttggttttaaatttttggttttaagtagtttttttttttaggttttttaaagtgttgggattataggaatgagttacggtatttggttataaattttattttttttcgtgtatgttttaatttttgtgatttttgtagttaattatatgtgttgttaatggaattaataatttatttaaatgtgggtaaaagtatgttttttaaaaagtagtatagaaatggaatacgaaagggaaatatttttatggtagcgtatggaaattttattaattaaattaaattgttttatttataaatagtttattatttataagtgatgtatatatgtggtatatagtaaatatcgtagaaatgtgttttttgttgttttgagatgtggtttttttttgttttttaggttggagtgtagtggtataattatggtttattgtagttttaattttttggatttaagtgatttttttattttagttttttaagtagttgggattataagtgtttattaatatgtttagttaattttttaatttttttgtagtaaagaggttttgttttgttgttcgggttggttttagatttttgggtttaagttatttttttattttagttttattaaagttaaagtttgaaggtaggaaaggaagagtttttagggaagggattaaaatgtgtaaagattttgaggttgaaaagagttgaatatggttaaggaatggttggagttgagaatttgagtatgcgttaatatatacggggttttatatgtatagatagtaggttgggatgtgatgaggagaggttgagtaatgggaggttattggttttgtttagttaggagtgtaaattgatttagtttttatttttataaaattgtttttggttgttaggtggtaaatggtgtggggagatagggaaaagagatgttaggagaatagtttaatattattttggaaagaagattttttttatttaagaatggaatggaagggagataatgtagatttagatatttttatgtgaagggaagggaaaatgttgtttatagtggatgggatttatttttttttaagttttggtgttagagaattaagaagagtaggtcgcgtacggtgttttatgtttgtaattttagtattttgggaggtcgaggtaggcggattatttgaggttaggagttcgagattagtttgattaatttggtaaaatatcgtttttattaaaaatgtaaaaattagttaggagtagtggtacgtatttgtaattttagttatttaggaagttgaggtaggagaattatttgaatttgggaggtggaggttgtagtgagcggagattatgttattggattttagtttgggtaataagagtaaaatttcgttttaaaaaaaaaaaaaggtttgttgagtagtagtaagtgtagaattaatgttaatattaatttgtattgggttaagatagtaggattttgtgattttttaatattaggtttattgtttaggagtaggaatgaaagaaataggataatgattttgaattgaagatagatttcgttgtatttggggaaggattgatagaaagagaacgttgaatgttataagggtattttagagggaaaaaatggaagtagaaaggaaaaatagattgaaacggtagagagaaaagtgtttgtagggagggtttggtgaagaaatattattgtagtgaaatgaatgaaatgtttaatttttttttttttgtaaaaaaataaaaaataaggaaaattttttttttatataatttaaagtttttacgtaagtaaaaaggaataggtaggtcgggtgtcgtgatttatatttgtaattttagtattttgggaggttaaggcgggtggattatttgaggttaggagttcgagattagtttggataatatggtaaaattttatttttattaaaaatatagaaattagttaggcgtggtggtaggtgtttataattttagttatttaggaggttgaggtaggagaatttttgaatttagggggtagtgagttaagatcgtgttattttattttagtttgggtaaaagagtgaaatttgtttaaaaaaaaaaaataggtttttttgaatttttttttttttttttttttgagatgaaattttgttgttatttaggttggagtgtaatggtacgattttagtttattgtaattttcgttttttgggtttaaacgatttttttgttttagtttttagagtagttgggattataggtattagttattacgttcggttaattttttgtatttttagtagagacggttttattatgttggttaggttgttttcgaatttttgattttaggtgatttacgcgtttcggttttttaaagtgttgggattataggcgtgagttattacgtttggtcgaatttttataaatgatttgaaagaaaatgagtttatttttttttttttttttagacggagttttgttttgtcgttattttggaatgtagtagcgttatttcggtttattgtaatttttgttttttggatttaagcgatttttttgttttagttttttaagtagttgggattataggtgcgtgttattattttcggttaattttttttttttttttgagatagagttttgttttgtcgtttaggttggagtgtagtggcgcgatttttgttcgttgtaagttttatttttcgggtttatgttatttttttgttttagtttttttagtagttgggattataggtattcgttattatatttatttaagtttttgtatttttagtagagaaggggttttattttgttagttaggatggtttttattttttgattttatgatttgttcgtttcggttttttaaagtgttgggattataggcgtgagttatcgcgtttggtaatttttgtatttttaatagagacggggttttattatgttggttaggatggtttttattttttgattttgggatttgttcgtttcggttttttagagtgttgggattataggtgtgagttatcgcgttcggtcgagtttatttttaaaatatagtaaaaattttaagtttttttttaaggtttttgtggtttgttgtaggagatagaagaaaggtgagaagtaggtagtaaatggaagtagaaagagatataaagttgtgattattaggttgtgatatgtttgggtttttttatttgagttgtatatttttttggtattttacgttttagtttggtttttagattatgtttttttaggtttttttttagtgtatatagtaataatagattgatttgaatattttcgtttatatatattaagtttgggtaaggggaaggtaaaattatttattttgggtttatatgtagtgaggttttttagatattgataaaatattgttgtttttttatgtggttaatgttggaaatatagttgagatacgtattttagggtagtgtagtagttttagtaattgggaatttgttagaaatgtatatttcgggatttattttgatttattaaattagaattttgttggattttatttttaatttgtttgttttttttttttgttttgtttttgttttttgagatggagatggagtttggttttgttatttaagttgaagtgtagtggtgtgatttttgtttattgtaatttttatttttcgggtttaagtgatttttttgttttagttttttaagtagttgggattataggcgcgagttattatgtttgattaatttttgtatttttagtagagatgggattttattatgttggttaggttggttataaattttttattttaggtgatttattcgttttggttttttaaagtgttgggattataggtataagttattgtatttaatttaaatttgttttttttttttttttttttttttttttttttttgagattaagtttcgtttttgttatttagattggagtgtaatggtgcgatttcggtttattacgatttttatttttcgggtttaagtaatttttttgtttcggtttttcgagtagttgggattataggtatgcgttattacgttcggttaatttttgtatttttagtagagacgggggttttttatgttggttaggttggtttcgaatttttgattttttgatttattcgttttggttttttaaagtgttgggtttataggtataagttattgtattcggttttagatttgttttttaataagttttttagatgattttgatgaatgttaatagatttgaaaatcgttatttttaatttatatgttaaaatatgttaatatttttaattgttttatatttgttatatatattttttttagagtgatgtatttttttttttttttttagatggagttttatttttgttgtttaggttggagtgtagtggtgtagtttgtaatttttgttttttgggtttaagcgatttttttgtttttcgagtagttgggataataggcgttagtaattatatttagttaatttttgtatttttagtagagatggggtttttttatgttggttaggttggtttcgaatttttgattttaggtgatttaattgtttcggttttttaaggtgttgggattataggcgtgagttattacgtttagttttaatttttggtttaagagtggaggttaggcgcggaaatggggaaatggagtttttttatgttgtttagggtagttttgaatttttgggtttaagtgatttttttatgtgggttttttaaagtgttgggattataggcgtgagttaatatgtttagttttaatttttggtttaagaagagtggaggttaggcgcggaaatggggaaatggagtttttttatgttgtttagggtagttttgaatttttgggtttaagtgatttttttatgttggcgttttaaagtgttgggattattggtttgagttattatgtttggttagagttattttgggaagagtagtttatatttattttttgtttttttgtgacggaattttgttttgttatttaggttggagtgtagtggtatgatttcggtttattgtaatttgtattttttgggtttaagggattttttcgttttagttttcggagtagttgggttataggtatttagttaatgtttgtatttttagtagagacggggttttgttatgttggttaggttggtttttaatttttgattttaggtgatttatttatttcgtttttttaaagtgatgggattataggtatgatttaatatgtttggttttttttttttttttttttttttgagatagggttttgttttgttgtttcggttggattgtagtggtataattatagttgtgagtttgaatttttaggtttaagtgattttttcgttttagttttttaggtagttggaattaaaggtatgtgttattatgtttaatattttttgtattttttgtatagatttggtttttttatgttgtttaggttggttttaaatttttgggtttaagtagtttttttatttcggttttttaaaagtgttgggattatagatatgagttattgatatttaatattaatttggttaaggttatttaggttgtagagaggtagagttgggataatggtttttatttgattttagtatttttaggatttttttttttatttgtagaatgtggataagatgattaagaatatattttagagggtacgatagttaggataggattgttttaggaatatatacgaggcgtgttaaagaagatttagaaagatgaaaattaggaaagagttttgtggtcgagatttattttgtattttagagtattttatgtattttttgaagtatttttttattagtatttaatagtaattgttagattaagtattagttttagaggagtaaaaattagattttatagatttgtattaatgtatttaatataggtggtaatggtttttaaaaaaaaaaaatgaaaaatagtttaggtcgggcgcggtggtttacgtttgtaattttagcgttttgggaggtcgtggcgggtagattacgaggttaggagttttagattagtttggttaatatggtgaaattaagtttttattaaaaatataaaaaaattagttaggtatggtggtaggtgtttggaattttagttatttagaagattgaggtagaagaattttttgaatttaggaggtagagattgtagtaagttaagattgtattattgtattttagtttaggtaacggagcgagatttcgttttaaaaaagtttaaatatattaggggttaaataagttgtttttttttttattgtttattattaatgtataaaatatataaaattaaaaaaaaaaatatttatttttaaatttattttggttttaatttaagattttgtataaaatttaattaatttattgtttttatagaaaataattgatgttaaagtgaaggagagaattgggaaagggtaaaattattttgttgaatttatttaggaaggcgtttggtggggatttagaggtggttgatagggtgaagtatttggaagttttttttacgttggtaaggttttaggtgggagtagggagtgagttgatttttaaaggtagtgtatgtagtgtgatttttaggtttagtacgtcgggtttaagttgatgagaagttggttttattgaagtattttattaagtttttagattggttatagttggtaaaggtagattagtattatcggttttatttttgttagttaaaatttgtatcggatgtagatacgagttcgttattatcgaatttagtagatttaggacgtagattgggtgtttatagaaagttgaaggttttatttgagaaaggattaagaatggtgagtttacgttgggggaggggtggggatgatgtgtgttttagaatttaaatttagttgattgagtttttttagtgtagtgggatatataatattttttttagtatttttttattttatgaggaataatgaatttagttgggatgattttttaagtgtagttgattttgtgttagagttttgtgtgtatgtggggattcgtaatagaagggtaggggtgttcgttaggataattagttttaggtttttaagtattaagggtaatattggaaaggggtttggggtatagggcgaatttttttaaaaagtgaagttaattgggttttttttttagtagtttaggaacgtttttagttttttttttttttagattggaggaaaatatgtatattaatgcgtattagtgattagaaaatttttaggaatttaagtaagtgggaattgagggggtcggttttttattagttggggaaaagggaaaatgggttttatagaagttataatagggtggaaagagcgaggttgtagtttataggggttgtgtgaatagggtaggtaaatggtttttagggtagggggggtttattgatattcgggtggtagaaggtatagttgtttttatagcggtagttgttttttattatgaaatgtcggtagatagggcggtttgatatgtttgtgggaacgatggtaaaatagttagataggaaatagttgagggtaatgttatttttattattttttgtttatgatattttgagaattgttttttagagataattttggggatttgggggaagggtatagagtaggaattgttatgtatattaggatattaaagagacgggtattttacgttttgtttagttattaatagtagtgatttttatttattttttaaaagtttgtatgggataattaaaaggtatatgggggatagggagtatttttattttttttatggttgtggtttttatcgtgttttcggtggttttttttttcgtggttaggattattatggttacggtgtttatgaggtggcggttttcgatggttatggtttcggtgattagggatattatgaggtcggtggttatggggtttttcgtgtttagggtttttatggggacgatgtttattatttttatttatgttttcgttagggttttcgtgggggcgatgtttattatcggtatttattttttcgttagggtttttatggggacgatggttattgttattattgatgttatcgttagggttttcgtggggacgatgttttttatttttatttatgttattattagggtttttatgggggcgatgtttattttttatgttatcgttagggttttcgtggggacgatgtttattgttgttgtttatgtttttattagggttttcgtgaggacgatgtttattatttttaattatgtttttattagggttttttcgtttatttgggggtttttttttagagcgattttttttggcgtttcggaatggaggaggaggaggaggaggttcgtttttttttcggttatttcggtttttatggtatggtttaggatttggttttggattttttcgtattgggttatttcgtatagggtcgttcgggttattttagaagggattattttttcggggagggggtggaggatttagaagacgtggatttattggtttattagggtttttatggggatttgtaaggggataaaaaagagagatagtattagttattaggaattgttattttttaatttaaattattattttttattttttagttaattttatattattattagattgaaattaagtagataagtttattttaattttttatttattatttatttggtataggttttttaggtttagggggaaagtgttgtatgtttttggggtttttaggattttttggtgggaaattattggttattgggttagggtttaggagtttatgtggtattgttaatgaaaataagagtaatatagtatgagtattttagaagattagtatgattttttatttaggtgtaattaattgatttttttaaattaatttggtagagtaatgttttttttgtttagttttttttttttattttttgtttagtggttatagttttgtatttttttgtatttttgaaattttgttttttttaattttattgtaggtttttttttttagttttttggggttggttttgaagattatttagtatttgtttgattttgttcgaatagtttggttgttttagtagtttttttgaaggatgattgtttgggttattttgtgaggatgtaagaaggtaaagttaatagatagaaagggtaataattatggcgaaagatagcgttaaagattaggggtaagtgggtagatgtggagaattggggtaaggcgaatgggagatagtgaggagagcgagtttaaggaggttttatagaaggtggaaaaggggaaggagggtgcgtattatgatggaggtgaggattttttggatattaatgtttttttttttagggttttgggggttttttttagtatttatgttttttataagattggttagaattggaggtaatttggagttttttgttttattaggtgagttatttgattttttaggttttagagttttaatatacggagttttatttatggaatatttttgaaagaagaataaaaaaaattaggattgatagaatagagatatttttatatgaaagatgtatcgaatttaatgattattataatttttattattatagaatattgatttattttatttagggggatgagtttagggggtatgggttcgtagggtttaggattaggtttatgaggattattaggaataatataggtgagagaaaaaagaatgatagttaagttattaatttagattttgaaagtaatttttaatttttatttcgtaattattttagtttatgtttttttaggagtgtttaagtatttaatattttagggtacgaattttattttgtttatttttttttgtttaggaagagtttttgaaggatttttttttttcgtttagtttggatatatcgtttttgattattgtttttaggggtgataagaggtgagggtagaattaggggtcgggggtatatttagggtatttttttttttatgttattatggtttagacgtcgcgttgttttaaatgtatgtcggtttgatagtatttttcgtttagcggttttattaaagtttttgattttatttatatttattgtcggtaggggaagaaaagtaagagggaaagtaagtataattaagtttttttaaaattttttaaatatatttattacgtaggaaatgattttttatttcgtttagttttatttaatttaaaatagaaatatttttttagtttgttttttttaggttatgttatattttttttttttttgttttttcgggttagttggttaggatttttaggattttttattggtttggtatttagagtttttggttttaaagaggttggaagtagaagaggttttagatttagatttttttttttagaaaattttttaaattgaattagtttttagattatttgtatttatgagtttcgggattttaatagggggaatcggggtgtttggacggtttgcgtttattgttttagaaggtggtgttggttttggggaagaaggtttggttgtgtttggttttgtgttcgttttttttttaaaggggtttggttattgtgaaagaaaaggaagttaatgaattgattggaaagttaagggtaaggtaattagtttagggttttaggtatagttttttaatagtttttatataaaggaagattttgtttttataatgttttatttgtattagtttatatttaaggtaaaacgttttttgttgtttttttcgataatttttagttgttgtgtttttttttttattttattttttatattttgttattgaaatttatttttgggagtttatattttggtagtcgtaggtgatagtattttttttttttttttaattttgatgtttggaataggggttgaattaagagtatttagaaagtttaggttttttatagttataaaaagaaagagtattaaatggtattattagattttttttataattttatatttgtaaatatagtttaggtataaaatgagttagtgaagattttgttttaatttaggatacgataagtttaagaggattaggaagtatatgtaggaggatttatataggatatttttgttgttattttaggttttttatggtaggtaagttatagttttggatgtgaattatagtttaggtagttgacgaagtgagtttttgtgaatatgatagattattttattaggtgtttttgattagttatagaatggtatacgtttttattttatttttaaaattatttttaagtgatttttgaaacgggagttttagaggtataaaaagtaagggatattaagaaattaaaggaaaatggagggaaataataaaagagaagggaaaaaatttttcgtttttagggatatttatttttataagagtttgtttttggttaggtgcggtggtttatgtttgtaattttagtattttgggaagttgaggtgggtggattacgaggttaggaaattaagattattttggttaatatggtgaaattttatttttattaaaaatataaaaaattagtcgggcgtggtggcgggtatttgtagttttagttattcgggaggttgaggtaggagaatggcgtgaattcgggaggcggagtttgtagtgagttaagatcgtgttattgtattttagtttgggtgatagagtgagattttgtttttaaaaaaaaaaaaaaaaaagtttgtttttaatttaaagtatattttttttattttagatttacgttgtggcgggatgatttttattttgatttttttggtggtattaggtgttgtgttgagtggtttgtattttttttttgtagggggagtggtattttttggagtagttacgttgttgttagaagaggaattgttattaatattttcgatttatttttttttgtttttttgtgtttatagatttattttatttagagtttgagaatatggtttatatttttgacgtttgagggggatgggtttaaggttgtatttgttagaaattattattgtgttggtatttttttttataggtattaaggatggtgtttttagttttagttttggggaaagaagtacggtgtgggtagttgaatttaaattttagattttcgaatttttttttcgtttttattcgtaaatgtttttttagttttgtaattaaagttttttttgttagtttttttttttttttacgattaatatattatatattaaatgatttttttataaggttttgggtgtgtatatgtttatgaattttttagaggttagtcgttagttttattagtggaacggaatttggtatgattgggtgttgtggtgcgaagagatttgggtttttttttttttttttttggggtttttttagttcgggttttagtttttatttttgttaaaggtcgtttaggaagggtagttcgatttttttttttatttttacgtttttttttatttttttttgttgtgaaaaaataaagtagaaaaggattttatttagatgaatattgttagaggtgaagtagattgggagtatttaaaggttatattttaataggaaagaaataaatataaaggataaaggattaaggagtttattagtaggttgggtattgttttgagagcggatgatagttatttagtcgttgataaggattgaggttaattttcggagttttgtaggtgatagaaaggggaaatgtttaaataatgtaaagtaatatttttttaggaatagaaaatgggaggtttgagaaaatattgtgaaaatttatgtaacggagaaagtaatttaaagttttaagaagaatatgagatatgtttaaaaattaaatttttaaaaaatggaataatgaattagagttgtgttttatttggataatttttaattttgatgttattatattattttggagtaaaaagatttaatattttagaatatgtggttaaaatttatattagtaaaagattatacgttgggtgtagtgtatattgtttgggtgatgagtgtattaaaattttagaaattattattaaagaatttatatatgtaattaaaatttattagttttttaaaaattgatatttttttaaaaagttacgttagttgttttatgtataatatatttaattgttataataatttgaagattttttatttttttttatagatgtgaaaataagaataaaatttgtttttaaatatatgaaaaaatattttgtaattttttttttttgtatttggtaaataatatttttgatttatggtattttttttttggttaatatttttatttataaatttattttataatttattatttagtaataggagttttatagatgagatacgttaggatgatattattttttatagtaaattttaagtgtatgtgttttataataagtaattttaggaattagtttttagttaaagtatggtattttatatttagtaatagagaaatgaataattttggaattgagaataggaaagagggtataggttagaggaattttttttttaaaagaaggaaaaaaagtaaggtgaggtagaaagagaaaagtgaagggataatttaaggatgggaaaagatattaaggtaattaagtggaagtaatagagaaaagtttatgagagagtaggagtggtattttatttttatttttatttgatttgtttagttgttttattagtttagttgtgttgttttatgagagatgggagtagtagaaaggtaaatgttaggaggtaaataattttatttagagttaaaaacgataaaagttatagttttttttgtttttttttttttttttattttttgagacggagttttattttgttgtttaggttagagtgtagtggcgtagttttggtttattgtagtttcgattttttaggtttaaatgatttttttatttgagttttttaaataattgagattataggtatgtattattatatttgggtaaattttttgtattttttgtagagatagagttttattatttttgtttacgttggttttgaattattgggtttaagtaatttatttattttagtattttaaagtgttgggattataggtgtgagttattatatttggttgatatatttttttttttttttttttttttgagacgaagttttattttgtcgtttaggttggagtgtagtggtgcgatttcggtttataataatttttattttttgggtttaagcgattttttagttttagttttttgattagttgggattataggcgtatgttattatgtttggttaattttttgtatttttagtggagacggggttttattacgttagttaggatggttttagttttttgattttatgattcgttcgttttagttttttaaagtgttgggattataggcgtgagttatcgtgtttagtcgttatatatttattaaaggagataaatttaaattaagttttttttttttaaatttttattttttttttgttgttttattttataggtttaagattatagttatattagttagtttgagttttttatttattagattaaattaaaaaaggaagaattagggtttaaagattaaaggtatttgtttgagatggtttatagtgagcggtagatgttgtagggttagtagaatttgttggaggaggggaatgttgttggttgtttttgaatacgttagttaattgttaagaagtttgtagtcgttaacgttaataaatttgtaggtaggtaggagagtttattagtaatgttttttttaggttttgatagtattatattttataattttagttttttattaatgatttaggaattttatgttttatcgttttattttttcgttatatttttttattttaattatttagatttttatttatttgattaatatttttggtgaacgggtttgtaggagaatgtttaagtaagtgtatcgatttattatttttcgtgttttttttattaaattgtagaagatgagttagggttagaaatgaagtagttagtatttttttttttagtaaaagcgtttttttgtgaattgtttagagatttttaatgatttgggattttgttttagagaaggggagttatatatatttttaggaagatgggatggatttagtgtgatatggaaatttatgggagaatagagatatcgtagtttttgatttggggaggagagtatcgttgttttcgtaatatataggatgaattttattttgtttttaggtgataaggttattttttaataattgtttttaatagtttgtttaagattggtttagttatttatttttttttgaaaaatttgagaatttttgaaggaaaataatattatgggtaggtggaatacgaattaaaataatttagaattttgttattaggttattttgtttttattttaaagtatgatttttttgggatcgtggacgtttaaatttttagtttttattatggttagaaataagtgattatttttttttattttttattttaaaattgttatattttaattttattgtattgattattttttttttttttttttaggattattttagtgtgttttaattgtagttatgttttaatatataatattttttatttatagtgaatataaaaaggggtaaagatttatttgaagattttggaaattttatttatatttttgatttttttatttcggttaaggaagttgtttaggtttttgagaagttttttggggtttatgggattcgaatttatgatggtggtttttatggtaagaggataaaataaataaatttatagaataaatgggtggtaaggattattcgagtaggttttttaataaattatatttttatatttgataaagtataatgattaattatttaattatgttattttttagatatgaaaaatcgatatagattatttgttattattgagaaaatagttttggtaagttaagtatggggagtatatgtgattgaataggaaagtaattcgattggaggagtagggtagtatatttgttttttttttttagtagtattttttttaggatggttgaattttattagatcgtattaaagttaagattagtttttataataagatgtttaattttttagggtatttatatttatcgttaagttttgttttttttagttgttgataaatttggtttgaaaaatagtttatagtttgatagaaattgggttaattttgggtgtttgagttaaatgttttataagatttgagttttttttattttagtttattaagagttataattattatatatggtaagatatgtattagttgaagtggtagatgatggagaataaaataaaatttgaaaatagaatttttttttaaggagatttgggagtaggtgttagagattgagataaatggatgtatggaaattaagtaggtttttttagattttgaatagattgttatttattagttaaatattatataagtttttattgtttttaagttaaaaggaagttagtggtttgtgtttttaaaagtaaagatgcgaatttggttttttttttaaaaattacgttgtataagattttttaggaaagtttaaaattgaaaattatggaatttaaaaagggaatagataaagttaaatgttagaaaaatttttttttaagtagttgttttagattaggttgggaagggaattagttaaaagttaagttttttttatggaagggataagttagaattgaagttttagaaaggtaatttaggattaatatggttttgattgggatttttatttatattgtttttaaatatttgtttttaagatttaaaaaagaggttgggtgtagtggtttatgtttgtaattttagtattttgggaggttaaggtgggtagattttttgagcgtaggagtttgaaattagttttggtaatatggcgaaattttatttttataaaatataagtcgagtgtgatggtgtgtatttgtagttttagttattcgggaggttgacgtgggaaaacgggaggattgtttgagtttagggatattgaggttataatgagttgtgattgtgttattgtattttagtttgagagatagagtaagacgttgttttaaaaataaataaataaaaaattattaaaaaagaaagttattttagtaatatttgtttttgggtaataaggtttatattgagtagtaaggaagaggtaagaataaaattttttttattttatatttagtatagaagtaatagatataattttagtagaagggtagaaaaattagtattttataaagatgagtagttttgtgtcggaaaaaatataggttttttgtaagataatgtaaattagttttatttgtttttaaataaaagaaaaaatatagtataataattttagtttttttgtttttttaataaaaacgttagtaagtttttaaatgtgtaggttttaataatttaggcgagtagtagtagaagtagggaggaggtagttaggaagggtaggagtataattttggttttggagattataatttgtgggttgaatagagggagagatgaggtaagaaatgttgagaagtcgttgttgttttggaatttttataaatataagtggaatttgaggttagagaaaaaatatttaaggagaatattggaaaagattagatgttcgtgggttaaatttatttaagtgtggtgatttttatatatatagagatagatatagaaataaaggtattttttttatgtagtgagatattataaagtgatttatagaaattataaagagatacgataaagggatatataaaatagatattatatttgttggagattggaaaagtaatgtatgggttttaataataatatattataagtaattaagagattaagaaatttttaaaattttttttttttatatatatatatatatttattattagatttttaaagtaaaatatatgtaatttgataaaaggttttgaattaaatattattttaaattagttatttttgattgatttaaatttagagttgaatatatataattttggagaatttttttttgtatatttaattataagttaagttaataaatagatttattatttttattttttttagatattaaataaattgttatttgagtttaagtgttttttaagaggatgggagataagaaagaagagttagttttagaaaaatggattaatgagtataaagttaaattttgtttagtgttttttgttggaaatgggatttagggatttttttatttttatatgtataaataagaataaaagatattaatagttaaagggaagttaagagataaagtaaaattagcgttaaatatttattttttattatttatattttggaaatataagtgaaattttgttttatgagtattaattttgataaaatgtaagtgggtttttttatgatggtttttttttaggaagattagtttttatttaaaattaaggattttaagtgttttataatttagtttttttgttttgaagttagtatattttggaaaaaaattaaataatttttaaggcgtttaagtggaaaggaatgtaaagtttaatatttcgggtatagggttatagtagagaaggtaaattgagttgatgaaggtaggtaggggtcgtgattaagtgttgtaatattatttatttaagatttggagtttagaatgaaagtttaagaaagttttttggaattataagtaatttacggtatgattatgtttttttttaatgagttgttatttttttgattgtagaatatatagaaggtggggagtgaggtagtaattttttggtttatttttattttattttaagttatgcgttttttatggagaatgttttaggtagagttatattttattggtataaggtattggggaattttttattatttttattagagataaacgtttgtgatattaatttttgtttttaaaatgaattttatttgagggttatttaattaaatagggtgaaaaaatatttagtatagttaaagttattttatatttattattaatgaaataggattgaattggtttaggataaaaattttgtgtaagttagagttttttaaaaaataattgttttttaataaaaggagaaaaaagttttaaatttattttaatttagaggtatttttggaaatgaaaatgatttgtatttaattttttatgtttttttttttttttttagtgttttaggtattttttagtttgatataatagtggattgaattatgttttttaggtgatttattataaggttatagtttttttttaagtagtaagtttttattttttagttattttgtaaatttgatatatgagttttttaaaagtttatttgttttttaataaagatgtaaaatgatatattattttgatttatagaaaaagattttagattagaattttggttataaattataaggattaggttttttaagattttttgaatggatgtggtttttttagtagatttggttttttattttttatgttaaggaagattttttttattaattttttggtttattagagattaggaattttagtgggtagaatgtttagtttttaaggaagatatgttgtagaggtatatggtaaattgtttaaaagaaaaaaataaaataaaataaaaaaagtttgtagttaatagatatgtgaagagttttttttatttaatttagaagtttaagtaataatttgagaatttgtatttagtaggaagttagttttaagttttatttaggttattagagggtagttatattttttaattttgtttagaatttttacgttttagtgtaggatttttaaaaattaaaattatatggagagtttgataaagatttgattttgaaaaatttgggggaagaaaggaattagatatttaatattatttttagatagggtatggtttttgaatatgtattaaatgttatagtattgtatgagttgaaaaatgaagaggatattatttttttattaatgtttttaggaattttttttagaagggaaggaaaaagaaatttaaaaaaggtggttttttggggaaaaaaaaaaaatgaaagttgtgaaatgtaatattagaaaggttttgtttattagaaatcgtagtttgattttttttgttttgagtttataattgtcgtttttttttttaaagatttattttttattttagtattaatgtataggaattaattaagtgtagaacgtgatatagtattgaatatagtttatttttaaattgagaggtgggaatgagggcgatttagaagaaagttttgaaagtatttattttttttcgatttttattatataaagcgattaaatgtaggaggtttattggtttttaagtagaaatggtatattttagtgttattaggttcgtttatttttaagttatttttgtaagtttttgtgttttttttatttttttttatatatatatatatatatatatacgtttatatatatttttaaagttttttagttttaggtttgtttgtttttttatttttggtagttgaagtggggaaaaattataagtagttgtgatgagtgaaggaaagtgaaaataaaaattggttttataaaaattagaattatatagagatggatagttttgatatttaatttttataagtttttatttttttaagatattttatataatgaaaataaggaaaatgttttttttttagtagtaacgagtataggtagtgtaaaagtatttgtttaggggtggagttttaagagggtggagagaggaggaagaaagttgattatattattttttaaggttgttttttttatttgattaagtttttagggcggttttaagtttaggatggtaaaagggggagaaaaataataaagacggagggacgttattttgtaatggagaaagaggatttaaattaaaaagttattcggttttgtcggtagttttagttatattataaaatatttttttagtaaaaaaaaaaaaaaaaaaattaaaaattagttttttatcgtgaataatttttgatttattttgattagtaagagcgtagtgaaaattaaagtaattaaaatattaaaaagaataattttttgtagggaagaattgaatttgtaacggaggtttaatcggttattatcgattatttttattttttttatagagggaaagggggaggaaggatttggattttttttaataaatagggttgaggtgggaggataggaaaaaaaatgggttaagatataatttgtaacgtcgtttggaagataaaaggataaggaaagtcgttatattgaagtagggaagaaaaaaattttttttaacgatataaattttttagaaagttagtatttaattgtattaaatggtttttaaaattatatttttaaattttatattttttaatttttttattttttatttaattgtattttttttattaaaaaatattaagttaaaatgttaattatttttttgtttttaaatatttatgtaatttgtaataattataagatattttttatttttttaattattattttgtatgtattggtattaagattatattttgttttaagtgttttgtaatttttatttttagattgttatttattttaattatataaatatattttaagtaaattatattaaaattgagaggatttaatagttatttaaaaagttatagcgagttattatttttttttgtttatttttttattttgtaatttttatgtatagattgtttattaatttggtaaattgaaaggtattttgtttgttttatatataaagaagtggtatttttgggttataagatttattattttttgtatgtgagtttattaatttttttgaagattgttgttaattagaggaaggtaattatttttttttatataaatatatatggttttggtagtttggaaattggttggattattaagggttaattattaaaatttttatttgttggttttttttttattttttttttgtttgtagtaaggtagggaagagataggtggtaggggagagagaataagattgtttagatttataggttttttttaatggagattaagtgattagattggtttttttttagttttttatttgttttatggttttattttttttttttattatttttggttttataacgggaaacgttgattttttgttgtaaggttggtttttgaaaattcgatatttattatttaatttttttgcgacgttagtatttcgggtttaggggggagggggtaaaattttggaggaaaaaaaataaaataattaattaggatttaaaatttaattatttagggggttttattggattaaaaagttttttaaaaaataaaggttaatttagtatttattttttttttatttaattttatttagggaggggggtcgtagaaaaaagttttgagtggatttaaaaaagtaaacgttggatgagtgaatttgggtggtttgggaagggagggtggttgattatttttgaagttatgtagtgacggtttttcggttatagattttaagttttaagtagcgtgggttggtggggtgggtaagataggtgggaaggggtagaagatataagtggttgggttggtggttgttgttttttttttttttttttttttaggatttttttaagggtttagatgttgttgcggtttgtttttgtttttttcgtggtcggtttgttttttttcgagaaaatttaaatttgggataaaaggaatataagggagaaagatgtaattagtacgggttgttttaaaatatttataaatgttatttttgttgtttttaaataaatttgtgttttattttgatcgtaatcgttttaagtcgtggtttttaaatgaatttatttatttttatttcgttttttagatttaacgtttttcgtaaaattttatttattagacgataaagtaggtaaatttatttttaaacgaattttagaatggcggtcgttcgttcgggtggagttttttatattcggacgtcgtttaacgcgtttaaacgtgttagtgaaacgtttttgtcgcgagatattatacgcgaggcgtgaatttattggttaatttaaatgataattcgttaattgattggttatttttattttatttttgtttcgtttttttttttggtattttttttcgttttttttttgtttttttgtcgcgtgcgcgtgattaggagtttagtattttttttttttttgttttcgttattttcgttttggagaatattttttatttaggattggtagaaatttaagagcgtatgcgtattgagaggatatcgttaaaaatcgtttttaaaattgtttaaaaggtaaattttaataatgcgatttaagagtcgtagtgattggttaaaaaaaatcgtaattttggggtttaattcgattgtgacgtagttgaaattagttttttttttatgtttttttttttacgttttcgttttgacgtaaacgtggggtcgtttttcgtattgcgggtttgtttttggttttgttttatttagttttttgaagtatgcgtagttgttttttcgttaatttttgttttgggcgtacgttaagatggcggcgtttgtattaaatatcgtgttgaggcggttttttatgttatttttttttcgaggtttttatagagtttaggtaatttttcgaaagatattttgtataattttaagttggttatattttttcgaggttgtcgttttattgttaggaatttacgagtggagatttttttacgtgtgttttagttgtttaggtagtattttttgtaattttttttttatatttcgcgtattttttaatttcgagtcgaggattaaacgttagggttaggtattattttttttttaaaatgttattttagtaaaataatttaagtgatggaattgatttttgtttatttttagttatgtataattagttttttaaaaattatttaattaattaaggggttatgttaatttttgtatcgttgtaattttagtataatatatgtattttttaagcgagcgttataattagttgttaattatgtaagtggtgattaaatttgtgttgttttggaatgtttttggggaaattagggattttaatttttattaattttgttattttttaataaggttaggatatatttttacgatttgaggatagttttttagttttttttattaaattagttttttatcggagttatgagagtttaatttcgttttttgaattgaggtttttttttagttttgtgtatttatttttttggaggtttttggtggggtacggtgagataggaaggtttgtttagttgttattttttaaagtgggattgaagagtggtgatagaggttaatatagaaataataatagttttggtagttttaaaattagcgttaggatttaagtttgttttgttttgtagaatgttgatttttagtttttatgaaaatgggtaatttagtgattttattggattgatttggagatttatttgttttttgtattttttttttattatatattttagttttaagaatttagatatttttttttttattttatttttttattagagttaatttatttttaaaaagtaagaatattttttatgtattagattttttttttttttttttttatacgaaattttattttgttgttaggttggagtgtagtggcgtaattttggtttattgtaattttcgtttttcgggtttaagtgatttttttgttttagtttttcgagtagttgggattataggcgtatgttattacgtcgaattaatttttgtatttttagtagagataaggttttattatgttggttaggatggtttcgatgttttgattttatgattcgtttgtttgggttttttaaagtgttgggattatagacgtgagttattgcgttcggttttgtattagattttttatttgttttttgaaataagattgttttttaggtatatattttttaatttagttttttttttaggatttaattgtagaaaaggagagtggttgttgatttatgttaatttaaatttaataaaaatatttaatttatatatgtatttttgttatattttattaatgtagtatgtgtgtattttttttttttaaagtgtgataagtaaaataatttagttttttttttaaatttatttttttatttttttttttttttttgtaggtttttttttagattttttgtattaaagttttttttgaggaagattttttgtttttagtttttatttttttttataaggatgagttttggaaatatttggaattagaaggtatttttaaagggggaaagggagggttagataggatttgagataagtggatagagttatttattatatttttatttaggaataatttgtatgattttttattttagaatattaggagcgatatggttttcgtttcgtttgggttgattatcgtcgtaattataagggtggtgtatttttatagcggattcggaagatatgtattgtgagtttttgagagtgggatgtggagtgcggggaggttataagtaatagtaatagtagtattttttttgacgtgtttgaatatttttaattgttgttttttttttttttatagcgtcggaataaagttgttgggaatttttgttttatttgtcgagattataagttgtatgttgattttagggtaaggagagttttttttttttagggtaagaaaaataaagattaggggttgggcgcggtggtttacgtttgtaattttagtattttgggaggttaaggtaggtggattatgaggttaggagattaagattattttggttaatacggtgaaatttcgtttttattaaaaatataaaaaattagtcggttgtggtggcgggcgtttgtagttttagttatttaggaggttgaggtaggagaatggcgtgaattcgggaggtagagtttgcggtgagttgagatcgtattatcgtattttagtttgggcgatagagtgagatttcgttttaaaaaaaaaataaaataaaattaaaaaaattaaaaagaaaaataaagattaggagtttttttgtagtgttaaagagattattgtaggtgttttatatttcgtatatttaggaggttttatagttcgttttatagtaattgtttttggtattataaaaatatttttttagttttttattttttattatggattgtattgaaagttttattttatgtttatgaaatttatagtttaaattggtaggtaagagaaatggttgttttttttttttgagacggagttttattttgttgttaaggttggagtgtagtggcgtgattttagtttattgtaattttcgttttttgggtttaagcgattttttcgttttagttttttaagtagttgtaattataggtttgtgttattaagtttagttattttttgtatttttagtagagatagagttttattatattggttaggttggttttaaatttttgattttgtgatttattcgtttcggttttttaaaatgttgggattataggtgtgagttattatatttagttagcgaaatggttatttttagtgggagagttaatatttaaagattcgtttgtatttattatagttattattaaatatattggtttattttttttttgaggttttttttatttttttgttaatgtttagtgttatgttggtatttggggttggagggtaggtatatgaagtaagatagagtttattattttttaaaaagtttttaatatgtgagaaggataggatttgttttttaaagaatttgaaaatatattggttgggtgcggcggtttatgtttgtaatgttagtattttgggaggtttaggtaggtgttttatttgaggttaggagtttgagattagtttggttaacgtggtgaaattttgtttttattaaaaatataaaaattagttaggtatggtggtaggcgtttataattttagttatttgggaggttgaggtaggagaattgtttgaattcgggaggcggaggttgtagtgagttgagattgtattattgtattttagtttgggcgaaagagtgaaattttttaaagaaaaataaaataaaaagaatttgaaaatattatattaataaaatagataatgggaaagtgtttttttgagtttgtagtaaaagtattagagtagaagttatatggttgattattagggaagtagtagagtatttggataatagttagaaaatgggggtatttgattgtaataagaatttttttaatataggttatttaggagttttatagataattttttagttttaattgtatataattggttataaaaagagattatggttaggtgcggtggtttatgtttgtaattttagtattttgggaggttaaggtgagtggattatttgaggttaggagtttgagattagtttggttaataaggtgaaatatcgtttttattaaaaatataaaaaaaattagttgggtgtgatggcgggcgtttgtagttttagttttttaggaggttgaggtaggagaattattggaatttgggagatggaggttatagtgaattaagattgtattattgtattttagtttgagtagtagagcgagatttcgttttaaaaataaaataaaatagagattataattaattatataattgagagagagaaatgttataaatttagtagtatgggtgattttgtttgtattttattttataatgtatttgttttttttttaagagttttattttttagttaatttgttgagagagagttttatgtaaattgtaaaattatttttagtatataaattatatttagtatattattaaatatattagttgtttatatatatatattataatattattttttgggtgatttttgggatttttaatgattagttttagttttttatttaaaggttgacgttagaatttaatttttgtagtttaggcgcggtggtttatgtttgtaattttagtattttttgaggttaaggtgggtgtattattaggttaggagtttaaggttagtttggttaagatggtgaaatcgtatttttattaaagatataaaataattagttaggtgtggtggtaggcgtttgtaattttagttattcgggaggttaaggtagagaattgtttgaatttgggaggcggaggttgtggtgagttgagatcgcgttattgtattttagtttgggtaatatagggagattttgttttaaaaaaaaaaaaaaaaaaaaaaaaagaatttaatttttgtataagagatttttatgggagtatagtgatagaatatgggatgtgtaaggatggatttagtgaattgatgaagttaaattgggatatgaaggaggatggtatttggagagttgtagaggggtgaaggtggtttatgtgggtgtgtagggattgtgtattttcgatgtttaaagattttgttgttttttttgttttttttttttacgtttttttattatttttttttatagaacgtgaagtttttggagtaatttgtttgcgtttatacgggtattattttttatgttttatatataggttagtttattatttttgtattattagagagtttttttttgtggtatgttttgtttatgtagttggttaataggtatttgtttagtggtttttgtttatagtttaaaaggtttggttgaattttttggaaattttggtttgttgggggttaaagtaattaaatgtggataaaagaaaataataaatatagttaggcgtggtggtttatgtttgtaattttagtattttgggaggtcgaggcggttggattatttgaggttgggagttcgagattagtttgattaatatggagaaattttgtggtgatgtatgtttgtaattttagttatttaggaggcggaggtaggagagtcgtttgaatttaggaggtataggttgtggtgagttaatattgcgttattgtattttagtttgggtattaagtgaagttttattttaaaaaaaaaaaaggaaaaagaaaaaaataagtatttttgtaagtaaattatttaaatgtagtttttaattgataaatagtgattaatttttttttatagggttttttaatttttataaaagattttttataaattgttatataagttattttatattattgttaattggattagattttttaaatttggaatcgtaaatttaataatttagaattatatttattttttaattatagttatagggtaaatttggtttattgttacgtttatttgtttttatattttttgtaattgtttttatgttataatggtagagttgagtagttgagatagagattataggatttgtagagtttaaaatatttattatatgattttagatagaaaaattttgttaatttttgttttgaagtaagataaatttgtagagaataattttttgttgttttttttttttgagacgaagttttatttttgttgtttaggttggagtgtaatggtgtaattttgttttattataatttttgttttttaagtttaagtgatttttttgttttagttttttgagtagttgggattgtaggtatatgttattatgttcggtaaatagagatggggtttttttatgttggttaggttggtttcgaatttcggattttaggtgatttagttgttttggttttttaaagtgttgggatgataggtatgagttatcgtgttcggtagagattaatttttgtttttgttttttttgggggggtgtgggtggggggatgaaattttatttattttgttatttaaggttggagtgtagtggtatgattttggtttattgtcgtttttattttttgggtttaagtagtttttttgttttagttttttaagtagttgggattataggtacgtgttattgtgtttggttaattttttttgtatttttagtagagatagggttttattattttggttagtttggttttgaatttttgattttaagtgatttttttatttaagttttttaaaatgttgggattataggtatgagttatcgtgtttggttttgtagagaataatttgaatttattattgttgtgggtggtagtataattagtgtttagtttgttaagagttttttatagttaagttgtaaaggttgaagggattattattgttatttttttagattgttttttttaattttgaaattttttttttttttattgaatttttgtggattgtttaatttaattttttaattaattatatttgtttattaaattgtgttttttttgttttggaggttttattattaaatggtttttttatagtggttagatttttttaaatttttattttagttttttaaaagatgggggagatttttttttttgggtagatggggaaattgaggtttatggaggggttaggggaaaggggttattaggtaaagttaattttttttaatttatttttttgttattatatggaagtagttgtgttttattatttattgtgttttaaagaataagatatttttttttttataggagtttgtgtgaagtagtataagcggttgatttaggttatttagaaagttagggattatggtgagtatgagacggggtatatagtagttttgtttaggtataaggaagatgatttagggttagaaaatggatataaatgtttatatttgtttaagatggtagtatttagtatgttttttttgacgttatattgttttttgtttttttttttgagtgttttattttattattgttttgtttttttgttttttgtttttttattttttttttttttattttataattgttggttttaatgttttaggaagttttttatataaatgtttggttttggattatatggtattgttgtataagttagtaaaaagtatatttttttgttagggtagatgtagttttatagtttttgtttagtattgtatagttttgtaagtaagagttttagtagtatgttagtttatatttgttttttgggtcggttatttgtttgtagtatataatatgtataaatgtatttggtggttttgattggtttttttttttataatttttttttttattttatttaaattattttttttattgttttttaaatttttttttttttttaattttttaggtttttttatttattatattttttaggttgaattacgggattttgattttagtattttttatggggttgtgagtgttatttcgttagtttttattttggttttaggtgatttttggtatttatggtataattggaaatagttatcggagagagaattgtttcgttttcgtcggttttattagggttatttttaagaagagagtggttttttatttgagttaatgtttaagatgttttttagaatattagcggaagttttttttattgggtagataggtttttagagtgttttgtaggagttgtagattgggaagagaggttaggcgtggtggtttatttttgtaattttagtattttgggaagttaaggtgggttgattatttgattttaggagtttgagattagtttgggtattatggtgaaatttcgtttttattaaaaaatataaaaattagttgggtgtggtggtgtatatttgtagttttaattattggggaggttaaggtaggattatttgattttaggaggcggaggttgtagtgagttgtagttatatttttgtattttagtttgggtgatagttagattttgttttaaaaaaaaaaaaaaagattgggaagagagttagagggattaggagataatgtgtatgtaggtttatgtgatgggatattattttgaagagttgtgttttttgtggttagtgataaatttaggaaatgaatgttgttgatagggataaattttgaggttgagggcgggtggtatagatgtgtatgggaaattttaatttttatatattgtaaatagatgggttgggttaaatattgttgtcgttttatatttttattaatttagtttttatataataaagttttattgtttttggtttgttttgggttgttttcgatgaatgttattagcggggggtgggttgagtgatggtttttttatataagtaattgggtgatgttgtggggagataagtggttaggtttaagttagttttgtttgtgacgtttgggattagaagtcggggatgggtagttgtgttattttgttaagatgttttgtgggtttttattttatagtatggtttattgtttattgaggggttaaaaggttggatagtgagatattgggttaaggaagattacgttgttatggtatttattgtcgtgggatgtagggatggaaaggagtggtattgttaggggtatagttggtttggtaagaaaaacgggggttttgttagttgttaggacgttagggggtaaggtttataggcggggtttttggaaataaagatttcgagaggcggtgcggcgagaggaggggcggaagtgacgtcgtgtggggcgggttcgatcgcgtataatgggttatggagttttcgttcgatgtggacgcgttgttttcggagcggattacggtgttggattagtatttgaggtttttagttcgtcgattcggaattataacgtcggttcggtgatagtttaaatttattttttggtttttttttttcggtttttttttaaatttggtttaggtattacgttttttttttattgattagtgatcgttttttttgatgtttaggtttgtttttttggtgatttttgattttgggtttagtgggattgattagcgtttggatttgtgattttttatttcgggtttaaaatgttttaattaaaggatgtggttgatttggtttttttgtttttttataataattttaagggaggagggagtgtgttattttgaaaggtgtgatagaagtttgggttttagaagggtggggtgggaaattagattggaagatttttaggtaaaggtagggagtttttagtgttaaatttgggttggagttgtggtttaggtttttaggattgattgtttaggattcgttaatttagtgagtatttgattttttattttttttttttttttagtgttgatttatagtagtaaattatgattattatagatgaattgggtaaggtttttgttaaggtattggagagtttttagatggagtaaagggaggatttttgtggggatggtatataagggaggtttgggtttttcggagagatttgtagaaagtttgatttaattttttttgtaggtttagaattttttcgtttttattattagtgtattaaggatgtagagtaatcgttatgttgtttatatttttaaagatagtttagttcgatcgtgagtgttatatgtttttttattttatatttaattttttttttttttagttttttttttatttttgattattttttgtagatagatattattagtttgtttattatttttttcgttttatagggttggaaaaggagttattattggttttattaaagttggatataagaagttttttgtattggtgagtgttattggatgttaggagttcgtatattttggtttttgagaataaaagtgttggaggttagggggtagtagagatgtcggggtttttaaaatatttttattgttttttttttaggatgatcgtgaggtttataatgaggtagaattattttgtattttggatttttatatttatgagtttgtgtaacgttatggttatgggcgagaatttttttagtatatgttgtaggtattattgatttttttattggtttatttaaattaggggtttttttgttttgagtttttttagaagttttgttttttattttttatgtttttatgttattttattttttttttaggtttttggttttttgttggtatgttttttttatatttttttttattttgagtttttttttttttgtagaaggagcgagtggaatcgtattaattggtaattgatcgatttttatagaagttgttgaaatttttgaataagtattataatttggagattatagttttataggttagaggttttagagaatagatttttattgagtatttttattgaatttatttgttatttatggtaaagaagtagtgatttattttttattatataggttttattttttataattaggtttttttttttttttgtggtattattttttattttgtagtgattttttttttatttattttgatttttttttttgagatggagtttcgttatgttgtttaggttggagtatagtggcgtaattttagtttattgtaatttttattttttggttttaagcgatttttttgttttagttttttgagtagttgggattataggtatttattattatatttagttaatttttatatttttagtggagacggagttatattatattggttaggttggttttaaatttttgattttgtgatttgttcgttttggttttttaaaatgttgggattataggtgtgagttatcgtatttgatttttttttttttttttttaaagtagagttttttgttgttgtttaagttggagtgttatggtaggattttggtttattgtagtttaattttttgggtttaagcgatattttttttttagttttttgagtagttgagattataggtatgtattattatgtttggttaattttttattttttgtagagatgaggttttattatgttgtattgggtggttttgaatttttggtttaagagatttatttgttttagttttttaaagtgttgggattataggcgtgagttattgtatttagatttattttgattttttattataagttgttttttatatttaattttttttttttttttttttttgtgagatgtagttttgttttatcgtttaggttggattgtagtggtacgattatagtttattgtaatttttgttttcggggtttaagtgatttttgtgttttagttttttgagtagtagggattataggtatgtattattatgtttagttaatttttgtatttttagtagagatggagttttattatgttggatagattggttttgaatttatggttttaagtgatgtgtttattttagttttttaaaagtgttgggattataggtgtgagttatcgtatataatttttatgtttaatttttttttgagatagagtcgttttgttatttaggttggagtgtagtggtacgattttagtttattgtaagtttcgttttttaggtttacggtatttttttgttttagtttttcgagtagttgggattataggtgtttattattatatttagttaattttttgtatttttagtagagatggggttttatcgtgttagttaggatggtttagattttttgattttgtgatttgttcgtttcggttttttaaagtgttgggattataggcgtgagttatcgtgttcgattttttatgattaatttttaatttaaatatagttagtttatttttatttttttgtttttatatagtttattatttatttggttagttagtatttattaagggtttagaataatatgtattttttgtttttatggagttttggtttaatatagggaaggaagttttgtttataattaagtgtagtaaaatgttattaatgttatttatttatttaataaatattgagtgtttggtagtgttttgggtattaggaatggtttatttaatgaaatagataatagtttgggtaatatagcgaaattttgtttttataaaaaatataaaaaaaaattagttaggcgtggtggtacgagtttgtagttttagttatttgggaggttgaaatgggagaatcgtttgagtttgggaggtagaggttgtagtgagttaagatcgcgttattgtattatagtttgggtaatagagagagattttgtttttaaaaatgaaaataaaaatagaaaaaaaggttaggtgcggtgcggtggtttatgttcgtaattttagtattttgggaggttgacgtgggcgaattatttgaggttaggagtttgagattagtttggttaatatggtaaaatttcgtttttattaaaaatataaaaattagcggggtatgatggtgggtatttgtaattttagttatttaggaggttgaggtaggagaattatttgaattcgggaggtagaggttgtagtgaattaagattgtattattgtattttagtttgagcgatagagtgaggattttattttaaaaaagaaaaagaaaaagggttaggtatggtggtttatgtttgtaatttttatattttgggaggttaaggtaggaggattatttgatattaggagttcgagattagtatgtggaatatagtgaaattttgtttttattaaaaatataaaaattaattgggtatgatggcgtgcgtttgtaattttagttattcgggaggttgaggtaggagaattgtttgaatttcggaggtagaggttatagtgagtcgaggttttgttatagtattttattttgggggacgaagcgagatttttgttttagaataaaaaaaaaaaaatagaaaaagaagggaatagataaaagtttttgttttagtggtggagtttatattttagttggagagataaataaatataataaataatatggttaataagtgttttggaaaaatgagagtaagtaagggtttgggagtatttaagtaaggtggggatgggagtatgtgggattgtaggttgaaaggggattattattgagaaagtgttatttgagtaataattgaaaggaagtaagagtaaaaattggtcgggtacggtggtttatgtttgtaattttagtattttgggaggtcgaggcgcgcggattacgaggttaggagatttagattattttggttaatatggtgaaattttgtttttattaaaaaaaatataaaaaaattagttgggtgtttgtagttttagttattcgggaggttgaggtaggagaatggcgtgaattcgggaggtagagtttgtagtgagtcgagatcgcgttattgtattttagtttgggtgatagagcgagattttattttaaaaaaaaagaataaaaattaaggttgggcgtggtgatttatatttgtaattttagtatttagggaggtcgaggtgggtggattatttgagtttaggagttcgagattagtttaggtaatatggtgaaattttatttttataaaaaatataaaaattagttaggtgtagtggtacgtatttgtggttttagttatttgggggtttgaggtaggaggattgtttaagtttaggaggtcgaagttgtagtgagtcgagatggtattattgtattgtagtttgggtaataacgtgagattgttttaaaataaataaataaaaaaaaagagtaagagttaagaaatatttggagagagagtattttagatagaaggtattattagtgtatggtcgtgaggtgggagtgtgtttgaaagagtaaattggttgtgtttagagtagtatgagttagcggaggagtatggtaggagatgagattagagaggtaatgcggaggaggggttttataggttattgtaaagattggtttttattttaagtaaaaaataagattaggttaggggtggcgatttatatttgtaattttagtattttgggaggtcgaggtaggtggattatttgaggtttttattgaaaatattaaaattagttgggtgtgatggtaggtgtttgtaattttagttgtttgggagtttgaggtaggagaattattagaatcgggaggcggaggttgtagtgagtcgttgaaattgtattattgtatttttgtttgggcgatagagtaagatttttttttaaaaaaaaaaaaaaaaaaaaatagcgttaggtgtggtattttatttttgtaattttagtattttgggaggtttaggtaggtggattataaggttaggagttcgagattagtttggttatatggtgaaattttatttttattaaaaatataaaaattagtcgggtgtggtggcgggtatttgtagttttagttatttgggaggttgagatagaagaatcgtttgaatttgggaggtagaggttgtagtgagttgagatcgtattattgtattttagtttggataatagaacgagattttattaaagaaaaaagaaaaagattattttggttgtgattttgatttttttttttttaataagattattttggttgttaagaataggtaatagtcgggtatagtggtttatatttgtaattttagtattttgggaggtcgaggtaggtggattgtttgaggattttaagattagtttggttaatatggtgaaattttatttttattaaaaatagaaaaaaaaattagttaggtgtggtggtgttcgtttgtaattttagttattcgggagattgaggtaggggaattgtttgaattagggaggtagaggttgtagtgagttgagattgtgttattgtattgtattttagtttggtgatagagtaagattttatattaaaaaaaaaaaaaaaatggaaacggtaataagggagttagagtagaagtaagtagattaattaggtagtaataattttggcgaaaaatggtggtggtttagattaaggtggtagtagtagtgatggtaaagagtggttaaattttaaatattttgaaggtaaagtaagtaagattttttgatagattgtatgtggagaaagaggattttaggataatgttaaagtttgagtagttggaagaatgaagttgttttaattgagatggtaggtagattagttttgggggaaatattaggagtatatttttaatatgttaattggagatgtttgtgatatgtttaggtttgagtagatagttggatatttttttggagattagggaggaggtttggggaggagagtttttagtatatatttggtatttaaagttaatagataggatgcgattattatagaaagattatagatagagaagttgtttttttgggttttttttaagaagtgaggatttttaattggttgttttgaaaagttatttttgtattgtttttggttcggtgttttgtttattatagttattttcgttatgtattttttttgttgttttagagtttggtagtttaatcgatatagtttttaaatttttattttttttttaattttttgtatcggattatcgttgtgttttattatgttagaggtagttgtggatataagtttcgtgattattattaaggattttaaggagaagttgtggaggaggtagaaagtggaagagacgtttatgttaacgggaacgttaatgaggaaaatggggagtaggaggttgataacgaggtagatgaagaagaggaatagggtggggagaaagaggagaaggaagaggaaggtgatggtgaagaaaagaacggagatgaaaacgaagtagttgaggcggtatggataaatgggtagttgatgatgatgaagatgacgatgttgatattaagtagtagaaggttagtgaggatgattagatagtaaaaaaagaaaagttaaattttaaattaaggttatcgtgatttatttattttttattttttattttagaatttaaatatggtcgttttcgagaggtttgtttgttttttatagatagtgttattgtagatgataggtatttattattatttaatttaaattagagaatttgtaatagaggaggaaaaaagaattaaaatttttaaggttttgtttttttaaaagtattttaaaaaggaagtttgtttgtattttttatttatattttatatttttgtatatattgttagggttattttttttttttttgagacggagtttagttttgtcgttaggtttaagtgtagtggtgcgattttggtttatcgtaagttttattttttgggtttaagtgatttttttgttttagttttttgagtagttgggattataggcgttcgttattatatttagttaatttttgtatttttagtagagataggtttttattaggttggttaggatggtttttattttttgattttgtgatttatttatttcggttttttaaagtgttcgaattataggcgtgagttatcggcgtttagttaggtttagttatttttaatgattttagatgattaagttagtttttggagggttttttgttttatttttgattttatttgtggtgtgattatatttattataattttaaaggaggaaaaaaaaaaaaaaaaaaattttgtttaaaaaaaaaaaaaaagtttgggcgcggtggttcgcgtttgtaattttagtattttgggaggtcgaggtgggtggattacgaggttagaagatcgagattattttggttaatatggtgaaattttttgtttattaaaaatataaaaaattagttaggcgtggtggcgggagtttgtagttttagttatttgggaggttgaggtaggagaatggcgtgaattcgggaggtagagtttgtagtgagttaagattgtgttattgtattttagtttgggtaatagagcgagattatattttaaaaataataataataataaaaagtttcgttttgagtattttagtagtttttttagtgtatgtagttagttgtattataagtagttggtttgtgtgagatggttaaaaaggttaaagataaaatgttttatttatttgttttttttgtttatgaaatggttgtttatttatttaggtttatttgatgtatgtgtgaaataatattgtgtaataataaatttaaattttattttgttgagttgttttaatagtaataaaaagaagttaaggaagagaagaagattagtaaatgtaattatagagtgattagtgaagtagatgaaaattgaggtcgggtgtggtggtttatatttgtaattttagtattttgggaggtcgagtcgggtggattatttgaggttaggagtttaagattaatatggtgaaattttatttttataaaaaatataaaattagttaggcgaggtggtttatgtttgtaattttagttatttgggaggttgaggtaggataattatttgaatttgggaggtggaggttgtagtaagtcgagattatgttattgtattttagtttgggtaataaagcgaaattttattttaaaaaaaaaaaaaaagaaaagaaaattgaaaagtaaggtgattttaaaggttattgaagaaagtgtttttaggaggaaggaatggtttatttggttaaatgttgttgattaaggagtaaagaggtttgagaagttattattggatttatttgcgttaggttattggtgattttaatgagtagttttggtgtagcggtgtttggaagtttggatgtagtgggttttgtagattgagaagttaggaatatagtaagaataagttatttttttaaattttgttttaatgggaatagaaatagagtaagagttggagagtgaagtggattaaaagagttgattttttgtagatgggagaataaatagtattagaatgatttagtagagagaaaatattattatgttagagaaagtggggagaattgttgaagtgatgttattgaatgggcggcgggggcgttgagatttggttgataagttagttttggataggaatatggatagttaatttattgtaatatgatttgatagatgtgattatagaggaggtataaggatatggatttgagtgttattttgggttgggggttgggtaaagaaagatgatatgtttaattttgaaaggtaagtgtttgttaggtggataaaaggttaaagtgtattttatgtagaggaataggtatgagtaaaggtagaaaggtattaaattattttttaggttaggcgtggtggtttatatttgtaattttagtattttgggaggttaaggtaggcggattataaggttaggagatcgagattattttggttaatacggtaaaatttcgtttttattaaaaatataaaaaaaattagttgggcgtggtggtaggcgtttgtagttttagttaattaggaggttgaggtaggagaatggcgtgaatttaggaggcggagtttgtagtgagtttagattatgttattgtattttagtttgggcgatagagtaagatattgttttaaaaaaaataaataaataaataaaaataaattattttttaggatattataagtagtgtggtgtggttggagtgttgggtatgtgtttgttggggggtgggggtgatgaggatgggttggtagatattataataaggttaaggtaagggataggtagggtttttttatagtatatttttttattaagaggtaatagagagtagtggaaggagtatagtttttttttgtttgtttgtttgtattttgagatggagttttagtttgtcgtttaggttggagtgtagtggtataattttagtttattggaatttttgttttttgagtttaagtaatttttttgttttagttttttgagtagttgggattagaggcgtttattattatatttggttaatttttgtgttgatgaggttttattatgttggttagacgtttcgaatttttgattttaagtgattcgtttatttcggttttttaaagtgttacgattatagtcgtgagttattatattcggttttggagtatagtattcgatatgaaatatattatttagttaatatgtaaggttagagtagtatagagtgtaaataataatttatattttatgggttttatgtggtatttatatgtattattttagtggatttttgtatatttttttgaggtaggtattattattaaatttattttgggtttatataaattaatgatttaattaaatttatatagttagtaaatagtagagtttatatttgaatttatagttatttgtatttagtgaattttttttttttttttttttttgaggtaaggttttgttttgttgtttaggttggagtgtagtggtacgattacggtttattgtagtttttattttttaggtttaagagattttttttattagtttggttaatatggcgaaattttatttttattaaaaatataaaaataagtcgggcgtggtggtatgtgtttgtaattttagttatttaggaggttgagataggagaagagtttgaatttgggaggtggaagttgtagggagtcgagatgatattattgtattttagtatgggtaatagagtgagattttatgttaaaaaaaaaaaaaggtcggacgtattggttcgcgtttgtaattttagtattttggaaggttaaggcgggcggattacgaggttaagagattaagattattttggttaatatggtgaaattttgtttttattgaaaatataaaaattagttgggtatggtggcgtatgtttgtagttttagttgtttcggaggttgaggtaggagaatcgtttgaatttaggaggtggaggttgtagtgagttgagattttgttattgaagtttagtttggtaatagagcgagattttattttaaaaaagatttttttattttaattttttaagtagttgggattataggcgtttattattatggttggttgattttttgtatttttagtagagacggggttttatcgtgttagttagggtggtttcgattttttgatttcgtgatcggttcgtttcggttttttaaagtgttgggattataggtttgagttattgggttcggtttacgtttggttaatttttaaaaatatttttgtagagatgaggttttgttatattgtttaggttggttttgaatttttgggtttaagttatttatatgagttattatgtttagtttttattaaatttttttttttgagatggagttttattttgttatttaggttgaagtatagtggtgtaattttagtttattatagttttttttttttggggttaatggatttttttgttttagttttttgagtagttaggattataggcgtacgttattatatttagttaatttttgtatttttagtagagatagggtttcgaatttttgattttaagtgatttattcgttttggttttttaaattgttgggattataggcgtgatttattacgtttggttttcgagttttttttttttttttgagacggagtttttttttgtcgtttaggttggagtgtagtgttgttatttcggtttattgtaagttttttttttgagtaaatttttaatggttatattatttttttggttaaaatattgtagttggaattagaagtttgaaagttgaggtttagttttgttatttgtagttatttggtattggttaagcgaagttatgtttttaaggttgtattttttttaatttttttttaaatagtgatttttaggattgtgaaggttaaattaaatgtgaaaatataatgaagtaattttaaaattaatagttattagttattaaagtagtattttggtttttagtatgtttttttttgattttttttattttttggaattttgttgaattttttatttatttatttattttttgagacggagttttatttttttgtttaggttggagtgtagtggtacgatttcggtttattgtaattttcgttttttgggtttaagcgatttttttgttttagttttttaagtagttaggattataggtgtatattgttatgtttggttaattttttgtatttataatagatatagggttttattattttggttagatcggttttgaatttttgattttaagtgatgtttgttatagttttttaaagtgttgggattataggtgtgagttattgaatttggattttagtatttttttatgtgtttattggttatttgtgtattttttttagagaaaagtttatataagttttttgtttgtttttaaattgtgtttttttttgttttgagagttttttatatattttagatagaacgtatttattagatgtatgatttgtaaatatttttttttattttgtagattgtttttttattttttttttttttttttttttttgagacggagttttgttttatcgtttaggttggagtgtagtggtacgattttagtttattgtaagttttgtttttcgggtttacgttattttgttgttttagtttttcgagtagttgggattataggcgttcgttattacgttcggttaatttttttgtatttttagtagagatggggttttattatgttagttaggatggtttcgattttttgattttatgattcgttcgtttcggttttttaaagtgttgggattataggcgtgagttatcgtatttgatttttattgtattttttttgtgttgaggtatgtttagatatattagttgaattattatgttagaattgtttatagttggttgagtatggtggtttacgtttataattttaggatttttggaggttgaggtagaaggattatatgagttttggagtttgagattggtttgggtattatagtgagatttttatttttataaaaagttaaaaaaaaattagtagttagatgtggtggtatgtatttgtggttttagttatttgggaggttgaggtgggaggattatttaagtttaggttgatgttgtagtgagttgtgatggtattattgtattttagtttaggtaatagagcgagattttgttttttaaaaaaaaaaaaaaaattgtttatagtatttagtatagtaatatgttgtataggtttgtagtttaggagtaataggttgtatgatatagtttgggtgtgttgtaggttatagtgtttaggtttgtgtaagtatattttgtgatgtttatataatgaaattatttaatgacgtattttttagaatgtatttttatcgttaagtgatgtatgattgtattttgtttgttttattttttaggtgaataattttgtgatttttgaaggtttttttgtttattaatatcgtaagtttttgtattttgttggttacgtagtcggggtgagggaaaggaaagagttggatttttggttttgtcggttttttattgaggggtttcgtcgtttttttttttatagggttttttgttttttttttgagggtaattcgatattttcgtgttgttgtagtcgattttacgttcgttggtaaagtttgtattgaaggggtggaattgtagtgtagtgatggttatttattttagatgttacggggtatagtgttatttgtgggtaattttggaaaattttaaagtaatttaagtttttagtagttatgattgtttgtttttgtttttatgggagtttagtgtattttatatttggtaagatttttaattaagtaagtttattgggagtttgtttgatagttgatattaatggatttttttgttagtttaggttcgttaatataggttagagttaggtttttttgtaaattttaggtttttgttagttagtgagggataggttggtgtaaatagtttttttatttgtagttatagaatagtgatataaatggtttaaaatttaaatgttatttttagaagataatatttagagtttataatatttttaattagataatgaaattgatatggagaaattaaattttagaggtattaaaatgttgtttagattttttattttatatatatatatatatatatatatatatatatatataaatatatttattgatagtttgagttttattttttttttttttttattatttttattttattaatttttgatagttgtatagtgtttgtttgtatagaagagttttttttttgagttggttttgtggttaggaaaggatgtaattattatttaaatagtagtttgtaattagttatgagtattatagtgttaggtattgagaggtattttaattcgttttggtttttaaggttttttttatttagtttgtttagaattataggttgtgagagggattgagggttaataaggatggtgaggttttaggtttgtaggggagggtgttgtggataaagtttaagtgaatttgttgagaagttttttatttgttatatatatatgatggagaattttttgagagggaaagtcgggagtaagtagagaagtgaggagggggaggttgaattttggatattatattagttttttgtttattttgatagtttttttttagatgtttatatttattttttttttttttttttaatttaataaaattttagtttttttttattttcgtataggaaggagagattgtgttttttttttaaattttttttgatttttttagagtaatttttgattaattaagggttttgtttattttatttagaggaatttagggttttcgttggttcggttgggattattttattgttttagaatattagggggtcgtgatagtatttattgatagtaagagtttattttttttggttgttttttttttgtattttttaggtttttagagtttttttttcgatttttttttttagttttgtgtttggtttattttttttggttttttttaatagtgttttatattttttttaaatttttttttggtgtgttggtattgttatggtgttgtttttgtaagtttttaggaggaattgtggtgttagggagtagaggtttggggttggggtatagtggttgggaggaggggtgtaaagtatgttttttaacgtttattttgtttatgttttttttattgttagttttagtaaggaagttgttatttaagagagtagagggagatattaagttatatttttttagtgatcgagaatgtaagaggggtaagggtggggtgtttgggtttggggtattttaatataagggaagagaatgtttaggggatttagggaaaggattcgttttttttaaagatttagattttttgggttgggtatggtggtttatgtttgtaattttagtattttgagaggttaaggtaggtagatcgtttgagtttaggggtttaagattagtttggttaatatggtgaaatttcgtttttattaaaaatataaaaattagttgggtacggtggtacgtgtttgtaattttagttatttgggaggttgaggtaggagaatggtttgaatttaggaggcggaagttgtagtgagttaagatcgtgttattgtattttagtttgggtgatagagtgagatttcgttttaaaaaagaaaaaaaaaaaaaagaaagatttagatttttttttttttttattaaaatttttgttgttatgattttttttcgttttttttttttttttgttttgttttttattttttttgtttttagttttgaaggtagttgtggagtttttttggtttttaaatagggtttttcgtcgcgttatatttttagtttatttattttttcgttttagtagtttgggaaatttattagaacgaggtttttttcgtttttttgtgttagagtaggagttgttgcgttttttgcgtttttgttttttatattttatcgttcgttttttgttggttgttgattttgggggtagtttagtttaacgtcgtcgtattaggtaataggagttgaagggttaaggagttttatagttataaaagaggatgttagaaatggtaaagggtaatttgaatttattagagagatggattaataagatgggtggtttggggggggttttgaaattttttaagaaaaatatttgtgtaagtgatttgggaaaaaaatgtagtgaaggagtagaataggattttatatggagtttagggattttggttttaatgtgagagttatgtggaatggtaggaagaatatcgagatttattaagttgggggaatagagttttttaagattgggaaaattttcgtttaatatttgttggggaaggggtagtgtttgatagagagtgggaagttattggtttgtgtgttaagagtttatcgtagtaggtagggagtgggtattttttttatttttttttttttttttttatttttgatttttttgtttttttttttttcgtttttcgttattttttattttttttttttttatttataatatttttttatagttttttttttcgttttgaggagagtcgatattaatagttattttttttttgttttgggagatttggggtgggtagggaatttttttttgagaattttagatttatttttttattgtattttgtaggatttagtggaatttgatagagtttataggatttttttttttatttttttagatagtagggatgttagggttttaaattgtttaatattttgtagttttttttaatataaaagtatttttttttttttaatttgggttttgaatatttttttaataggaagtttgatttgttgttagattttttagttagatggtttatatatttatttagagaagtatatttttgtttgttgttaaattttagaatattatggaaggtttaagggtattttgtgttagggaaattttttaaggaattttatttatgggataaattttatattttttttagtgtttattggtggttttaatattgttttgtgttgtttgttatatttgttttttgagtttgcgaatggtcgttagtgagtaagttttgttttagagtagtttagttaggtagaatagggatttattagttttttaaagggatttatttattattgttaaattttttatttttatattttgtgtaggtgttagggaattttaaattggtgttgttttggggtttttaaaggagattggttgatattattattttttttagatttagattttttgagggaggttgttttttgagagtagatttagagtgttaaggatttgttagattttggaatttttttttgtatttatttttttttggtagttaggtttcgatatatttttgttttgtgagattgtcgagatgagatgggggattattttttttttgttttttttttttttttttttttatagtaaggacgattttttttgttttatgtttagagtatagttagatttttttttttttttattttttgaatgtgtgttagattaggtgttttattgtgttttttgaaatttttgggagtcggatttttttattttttttatttattttttttttttttttttttagtgttgtttgaataaagtgtgaaattttttgtgttttttaaattgatatttttaatgaaaaaaagaattataaaaaaaaaagttgttagttttatttgtgcgttattttttatttttttaggattttaggatttttgttttttttattttttatttttgagatttgtatattttttatttaggagttttagagtttttgagtttggtgtttgtttatttttatttttattgttagtttttttgtagattttgtgtttttttttatgtaggtgttggatttttgtgtgtgggttttcgtatttatttttttattttttttaggaatttttagttttttttagtgatttttattttttattttgggcgtgtttttgttaagatgttaaagtttattaatatttttggatttattaattattttttgttttttgtattcgtttttttattttgattatttgacgtttgttttattaaatcgttggattttttttaagataaatttttatttttattgagagtgtaatatagtttgttattttatttatagaggtttttttttttttttttttaaatttaaaatttagttttgttattttttatttttttttggtttaaggaatttttttttttttttttgagatggagttttgttttgtcgttaggttggagtgtagtggtataattttagtttattgtaattttcgttttttgggtttaagcgatttttttgttttagttttttaagtagttgggattatagaagtgtattatcgtgtttagttagtttgtgtatttttagtagagacggggttttattatgttggttaggttggtttcgattttttgattacgtgatttgttcgttttggttttttaaagtgttgggattataagtttgagttatcgcgtttagtttggtttaaggaattttatagttaaggtaattttgttttttaaattaaatattagagtattcgatttaatatatttttgattatatgtgagtttgtttttttgatatgatttggattatatttagttatagatttaatatattattttaattagaaagaatagagtaataaattagaagtattttagaaaattttgggtataaaatgaatttttttcgtttttttttggggtatagttttgattaaaatttgttaggaatgataattatttttttttttttgtttttgtgttattttttttattttttttttttgatttttttatatttatttattttttatttagtagttttttttttattattttttattttttttatagggggatttttttaggtttggtagtttaaagttgttgttatagtcgttatgggggggtgaattttttattttttaatataggtaagtatttatttttttttatttttaaattaagtaggttatatttattgtttatttttgtttttttatttatatgtttgatatttttataggtaattaagattttaagtagggagaataggaaataaagaataggtgaggtttaaattttttttttaatagttttttattattatttgattttttttttaatattatttttagttattttttatttttaaattttatcgtatgaattggatattagttttttttataattttttttattttatattttgtaagttttttttttttataggtttaattttggtatttttttttggaatacggattttttgagaggttttaaatttggatatagtattaatggttttagttttatatttattatgtgttttatattaaaatttggttcgagattttgaagagtttgtaattttaattttttttttagtatttttataatttattttttatttttttatttattaggtttgttagtgaggagtaggttttgttataggatgggtttggggagaagtttatgtatatagtttttttataggtttcggtttcgttagtttagttttggatagtgggtggggatatatttaacgttaggtttattcgaaatttgtaggaacgtcgtagtattaggttttggtgatcgtagtttcgttaaatatttttaaagtattattttttttttattataggaaagagttaaagtttaatttttataatagatggatatatttatttatttatttatttagtaggtttattagatttaagttatttgtattttttaattagattaataaaagtatttatttttattataagagttgttgaaaaatttgatttattattttagtcgttttattttttattgtcgttgtatttatttagtttttagttttgtttttgtttagttttttgtttaaaggttttagttgtgaatatagcgtttgggggggtaggggaggttgtaatttgcgtaagcgtatttaggtagttttcgagttcgcgggcgtaggcgcgtttatagtcgatagagcgttttagtcgtttttttcgagtttgtagtgcgtaagcgcgggatattttcgttttttttttttagttttttttttttttattttttcgtttcggtttttttttttttttacgaagtcggttttggggcgcgtttatttttgtgaggaggtcggaggtcggatttaggaggttttttttttattttcggaagattatgtattagtttagtcggggtgcggttcggcgtttcggtttttgtttgcgcgtttattaggttcgattttaggtgagcggaggagaagagggagggaggagagggggcggggagagattttttttaaagtcggtgcgtggggcggagcgcgcgttgggtttcgcgtaggcgtagagatattcgtcgtttttttttatttgtgttttgtagcgcgtggataggttaggggtcgcgggagcgggagggaggcgttgtcgggtttgtcgcgtaaggacgtcggtttttttaggtttgagggcggttaggcggggttaaggttaggtagcggggcgcgtttgcgttgcgttcgatttttcgcggttatttgtgtttagaggtgatttgaagggtaggggtcgagagattcgtagttttgttgcggcgtcgtttcggagtttttcggtttagattagattcgcggggcgtttttagtagttcgttcgttttgtattcggagagcggttttggtaggaaggtcggttagtgtgtattcggttcgggtttttgcgttcgggttggtaagatggttacgtttttagtagagacggcgtttttaggatattatcggggatcgaggtattcgagcggttcgttcgttttttttgtagtgagacgattttttggggggttttttgggagcggagggattcgggtgaggtttaattttgggtgatttttttttgtagttttaacgtcggtaaatttaggagagtgaaggttagtttttaattgttttttgaggttgtgtttgttattagaggggttcgaaatgataatagtttttatttatgtattgttttttaggtcgttacgttttgtttatatttattattttatataggttttataatttagtgaggttttattgtttttatttataggatatttgtaggaagcggaggtatagggaatgagaatgtttaaagttatatgatagaatttagatttttagttttagttggatatttttttttttttgtatatttgtttcgtatatttaattatggagatgtataggttatagtatttaatttatagtataataaaatttgttattcgttaatttattaagtatgtattatatgatttttgcgataagagaggtgaaattgtttttagtgttggaatttttttttttttttttttgaaatggagttttgtttcgttatttaggttgaagtgtattggtattatttcggtttattgtaattttcgttttttgggtttaagtaattttttttttttagtttttcgagtagttgggattataggttttcgttattatattcggttaattgttttgtatttttagtagagatggggtgttattatattggttaggttggtttcgaatttttagatttcgtgattcgttcgtttcggttttttaaagtgttgggattataggcgtgagttatcgcgttcggttatatttttttaagattttaatattgggtcgggtacggtggtttacgtttgtaattttagtattttgggaggtcgaggtgggcggattatttgaggttaggagttcgagaatagtttggttaatatggtgaaattttatttgtaattaaaaatataaaaattagtcgggcgtggtgaagggtgtttgtaattttagttattcgggaggttgaggtaggagaatggtttgaatttaggaggcggcggttgtagtgattcgagttcgcgttaatgtattttagtttgggcgacggtgagatttcgttttaaaaaaagaaaaaaaagtaaaatgtttgttaggttttgggaggtgtcggtatttatgttatataaaatagtttgttcggttgggcgcggtggtttacgtttgtaattttagtattttaggaggtagaggcgggtggattacgaggttaagagatgaaaattattttggttaatatggtgaaattttgtttttattaaaaatataaaaattagttgggtatggtggcgcgcgtttgtagttttagttatttaggaggttgaggtaggaaaattatttgaattcgggaggcggaggttgtagtgagttgagatcgtgttattgtattttagtttggtaatagagcgagattttattttaaaataaataataaaataaaatggtttttttttgtttttagtagagatggagatgaatttatttttttttttttatagtaattttatttattttgttaggaggaataggtattggaagtttgttgagtatttaggggattaaggggtgttagataagtggatttttattttttttttttttgttttttttttttaggattagttttatttagggattttattatttttatttttttggttttattttacgataattatttttttatttttttttttattttggttttttttgtttttacgtttttttatttagcgttttttttaggtttttttattattttttttttagatttaggtttttagtttagtatgggtggttttttttttaggaaagggggaggagggattaggatttgagttgtatagcggttgtttggatgggtttagaagtttttttgagggatttttttgtttttattttggggtttggatatttttttaagtttttggaattgtttattttttttttgttatttcgttaggagattttagtatggaggaatatttgtttgttatgtatgagagattgagataagaggtaagttagtgtaaaagtggttttcgtttatagtgggaaggatgtgggtaatttttggacgtatagggatagttaattggatttttttttggaattatgaggtaggtatagaaatatattataaatatttttttgagaaaatgatgttttagttaggtacggtggtttaaagtgttgtaattttagtattttgggaggtttaggtaggtggattatttgaggttaggagtttaagattagtttggttaatatggtgaaattttatttttattaaaaatataaaaattagttaggtatggtggtagacgtttataattttagttatttaggaggttgaggtaggagaatcgtttgaatttaggaggcgtagtgaaaggaggtatttttattgtattttagtttaggtaatagagcgagatttcgttttaaaaaaaaaaagaaagaaagaaaatgatgttttttattttgggttaagggaggttaattatgggatgagattttttattttaagatgggagtaaggaggttttaaaaatagaaaattgggtttggtatatggtttacgtttataattttagtattttgggaggtcgaggtaggcggattataaggttaggagtttaagattagtttggttaatatagtgaaatttcgtttttattaaaaatataaaaattagttgggtatggtggtgggtgtttgtaattttagttattcgggaggttgaggtaggagaatcgtttgaatttgggaggcggaggttgtagtgagtcgagattgtatttttgtattttagtttgggcgatagagttagattttattttaagtttgtaattttagttattcgggaggttgaggtaggagaatcgtttgaatttaggaggcggaggttgtagtgagttgagattgtatttttgtattttagtttgggcgatagagttagatttcgttttaaaaaaaaaaaaaaattagaaaattgaaaaataggattatttttttttttttattgggttgatgttatttttttttatttagttttttaagttttttttttagttttacgattatagtttgtattttttggatgtggaatttattaatgagatttttaatatacgtattaagtgagaattggggtataggtagggtattggggaggaaaagtatttaaaggtatatatatgattttttttattttttagagaagtttttagattgttttttatagttgttttttattttttagaagttagtttggttttttaattttgttattatgagattttttttttattttttttttataggggtcggatatggtatatttttttattgattttttgtcgttttttggtttggaattattttgtatattttcgtttggaggttttatagttgattcgttattttgagaattggattttgtaagttcggtggcggtttgtggggttgttcgtttatttgttttttttgcggttttataagcgtgataaagacgagtattatcggtaagagagaaatgagaaaggatttaaattataattagttttttttttttttttttttgagacggagttttattttgttatttaggatggagtgtagtggcgtgattttagtttattgtagtttttgtttttcggtttttagtaattttttagttttagttttttgggtagttggaattataggtatattattatattcggttaatttttgtatttttagtagatagagggttttattatgttggttaggttggtttcgaattttttattttaggtgatttatttgttttagttttttaaagtgttgagattatagatgatttagttttttagataatttttgatttatttttatttgattgtttaaggatagggattttgtttagtttatgttaatgttaaaaaaaaaatagagattgggtatattagaaaaatttttgagttttagtttttttttatatagtgtttagtatatggtaggtatttaaatatttattgaatagattgggtgtggtggtttatgtttgtaatgttagtattttgggaggtcgaggtgggcggattatttgaggtaaggagttggagatttgtttggttaatatggtaaaatttaaaaaaatataaaaattagtttagtgtggtggtatatatttgtagttttagttatttgggaggttgagatgagagaattattttaatttgggaggttgaggttgtagtgagtcgtgattatattattggattttagtttgggtgatagagtgaaattttgttatatatatatatatatatatatatatatatatatataaaagtattgaataaatgaaaagttttgttttatatgttgagttttataatttggtaaattttcgtttgggagtagaattttaataaattgttagatttagttataaatattggatataagtttttaaattagtagtttttaaattgttgtatagtagaaatgtttaaggatcgttaaaaaatattgacgttaaatattttgatttaattgagatagggtataatttaagtattgagatgtttgtaagttgtttaggtgatttaatatgtagtagaatttagggattattcgtttaaataaatgtttgaatttagttttgggattagttatttttttttttagtaagtttttttttattttttaggatttatgatgtttattttattttttatttgaattttagtggttttatttgtcgttatcgtttagataaagtgagttttaggtagggttgggtggggtaaagggtagaatatttgtgtgttttttttaattggtattaatttttttttttgtagttgatgtttttatatttatttttaacgtttgtgaagaagttgttagtgggagttttggtggttttggggttgttagagttagaatttgatttaaatttgtgttttaagttttgatttttgattttggagtggaggtagtattgaagattgttacgtttaagagaaggaggtggaggtagttaagaattttaggagttagtttttttttttcgttttttttttttttttttttttattttatgttgtgtaaagttgttgtgtaatttaatttgtaaataataaagtttaattgattatatgagatagaattttatatattattttttttagattttaaatgtttttataagttttattttaaaaataattttatttaataggtattaaataatgtatagaaggaaaaggagttggtgttaggttttgtttacgttttttttttattttagtttttttcgtgttttgtttatttttttgggtatttttttagtatggggattttttagttttttggttttataataatggggagttatttttagaagttaattgtttttaatttttagtatttaggagagagaaaagattaatggagtttttttttttttaatatagattttttgttgttgttattttttttttttaaattgaaatagagttttgttttattgtttaggttggattgtagtggcgtattatggtttaaagtagttttattgttttagttttttaagtagttgagattataggtatatattatagtgtattattaattttttgtatagttggggttttattatgttgtttgggttgattttggttttttaaagtgttaggattttgttttggttttttaaagtgttgggatggtttataaaaatgagttattatgtttagttttaatttagatttttatgtgtatggttaaaagttattttttttttttgattgtagggttaggtgtaaaggtgtttggttttattattatatatttaaagggtagatatatttttgtatgttatttaagatattaaataagttatttttaagaaaagtttagaataatatgttaggtatagtggtttatatttgtaattttaatattttgggaggtcgtggtaggcggattatgaggttaggagttcgagattagtttggttaatatggtgaaatttagtttttattaaaaatataaaattagttgggcgtggtggtgggtatttgtaattttagttatattggaggttgaggtaggggaattatttgaaatcgaaggcggaggttgtatgagttgagatggtgttattgtattttagtttgggttataatagtacggaatttttttaaaaaaaagaaaagtttagaatataaagattatattttgtgagattagagattgttttgtttattatagttttagtatttatatagtagttatttaaatatttattgaataagtgtttagtttttagattttggaagatgttgatatatttgttagaaaggatgtttttgggttgggtatggtggtttatatttgtaatttttgtattttgggaggtcgaggtaggtatttgagattagtttggttaatatggtgaaattttatttttattaaaaataataaaaattagttaggtttggaggtttgcgtttgtaattttagttatttgggaggttgaggtatgagaattttttgaattttagaggtagaggttgtagtgaggttagattgcgttattgtattttagtttggataatagagtgagatttcgttttaaaaaaaataaaaaaaaataaaggatgtttttttattttattttatttttttttttttgtattagttttagtaatttgaatttgggtttttagtttgttaggatattatttttttatatagtttttatttgcgtgggtataggatgttttttttatttgttttatgaattttttggtggttaagataagttcgtggtagagtagttagcgtggttgttgtttaaagagggaggagttgggatgaatgaagattgtttgttgttgttttattgtgcggtagttatttcgagttaatcgtgtcgtgtggtaaaagtaattagtagtgatggtttaaggagcgggtaggaaagaaaattaatggaaaaggtagatatttggggattttaagaatgtattatttttttagtttaggttttaggaaaattagagaggtaaggaatgtatgaagaattttttaggaatgaatttttagtggtttggggaagaaagggttttgggaggatacgttatatataaggggaagagggtatgtttttacgttggaggaaatgttgtatgtttttagagaagtttgtttttgggaaggtattgggggtggaaagtaggaggttgaagaaatgttgattttgcgtatacggatatagtttttttggtaggaattgagattaatttttatacgttttaagagtttttttagttgttttcgtatatttcgggttcggcgtatcgatttgaattgtataaagtttttatagtattattgggaagagtaattatttttagtttattgggaagatagttaaaaagaaaggagagataattaagtatatagtaggattaaagttttttagtgttttttatttttatttatttaagtttagtgatttgtgtgtaaatatttagtagaattaggtggttatcgttagggagaaagaagttgatacgggtattgttagtatggacgattttgttttttggtcggtagaagatggagttgttgatagagagtatggtagttattgttaggattttttttgaatagttgtatttgggataggaaggggaaagtatgagtttaaagtaagatatataggaatagatatggtggagtggggagtgattattgtgtgatggatgtttttttatgtggggaaggttggttggtataatggttataaagtagttagtagatagattttggtagtagtttgggggttaaggaagtaggggttatagatgaaatatagttataaaggagggatatttatggaggtaggagtaggaaatatcggggaattttgaggtttttgtagaaagtgtgtatttattatgtgtatttggaaaagatttttgatagtagaggaatggtatttaaaggttatttttttatagttatatttaaatgttttagttggaaattttaggaataagtaagttttttaaggggtcgggcgtagtggaattaaggataggattaagtgttttatttttgtgggttttaaaagggggtaattagagttatttaatattttattatgtgttaagggatagtatgatgaatagaaaaagatagataaaggggattttggagatagaggaggtttggtttgtttgtgtgttgggggtttaggtggaggcgagggtttattttttagaggttaagattattttggatagtatggggtttatcggtagttttgttatttttcgattagattaaggagaagagagagagagttgagtttagtttttttttaggtttttcgttattattataggggtttttggagttattttgatttttattattttgtttttatttatgttgtttttcgatttatcgtggtgagttttttaaggtggttgagggtttttagagtatatagttgttttaaagttagtagtagtgttttatatggtggagggtttaggaaattaaagtgtattaggttatggatttttagaaagaggtgtgatggatggaatagagtttttttaaaggatagtgattttagtttttttttttttttttaggtagtttaattatttaagtttttgagtagtaatacgatattgtttaagttggttttttggattttaggtattgtggtttttttaagttcgtgttgataggtttaggcggtatataggcggaagtatttttttgtagttattcgatttgttttgttagttcgttgattggttgaggtttggaaagaaaggggaataggttggttgataatttggttagggaaaagaaaaaggtagtatttatgtaagaaatttggaaggatgtaaattgtttatttcggttttttaggaagtttttattttgtttttgagttggattttttttgtgggttaattttattttttttatttttatgtatttttaggttgattttgttgtagggtgtgatagtgagcgattttatgtttgtgcgggggttgtagtttttttgtttatagaattttggatttagtatataaatgatgtttttaatggtgagtgatgttttagtaatgttcgttgttataattatttgagtgataggatatggggttatttagtgattttatttatttagttatttagaaaaagtaattttggaaagttaggagtagtgaagtagttgtagtaaggggtaggagttgagggaattagtagtatttaaggttaggagtaggggataaggttagaagataggggatagggaagtgggggttgggagttagtagggttataggaggaaaggaaatggagaagaggatttagggttttttttttttttagagatgggaaatgggggtgtttaagtttttgttttattttttttattatcgttttcgtttttatataatattttttgtaagagttttttaacgtgtatttttgtttttgtttttagtttttgttatatggtatttaggatggtttttttaaaatataaatttgttatattattttttattttttagtggttttttattttattttagaatttaatttaagttttttaaaagtttggattatttattttagttgtttttttgattttatttgttagtattttattattttttttattttttttatatattgttttgttttgtttaagtaagtgtattttttattggattatttgtattagttattttttttgtttggtatattttttttttagatattagtttggtttttttttttatttggtttgggtttttattttattttttttttattgaagaggttttttttatattttaaggaaaatatttttatgttagtttttatttttattttatagagttaagttttattttattatgttgttttgtatttttttatagtattggttataaattgataatatgtatttatgtatttattgttttttcgatagattataagtgtaagtttgttaggttaaggattttgttttgtttattattgtattattaatttttgtgtatttgatatatagaaggaatttattaaatatttgttgaatgaaagttatatttttgtttaaaattttttgattgttatttagttgtttaaagtttaaatttcgttaagtatagtggtttatgtttgtaatttagtattttgagaggttaaggtaggcggattatttgagtttaggagtttaagattagtttggttaatatggcgaaattttatttttattaaaaattagttgggtgttggttaggtatggtggtttacgtttataattttagtattttgggaggttaaggtgggtagattatttgaggttaggagtttgagattaatttggttaaaatagcgaaattttatttttattaaaaatataaaaaattggttaggcgtggtggagggtatttgtaattttagttattggggggttgagataggagaatcgtttgaatttgtgaggtagaggttgtagtgagtagagttggtgttattgtattttagtttgggcgatagagtgagattttattttaaaaaaaaaaaaaaaaaaattagtttggggtggtggtatatatttgtaattttagttatttgggaagttgaggtataagaattatttgagtttgggaggtggaggttgtagtgagtcgagattttgttattgtattttagtttgggtaatagagcgagattttgttttaaaaaagaaaaataaataaagtttaaatttttttgttattaaaggttttttttaattttagttttaaattgtttttagttttgttttttatttttttattatatgaattttttattaagtttattagtttatattttgattttaaatatattttgggtttttttttgatgattttttagttattttttttttttgagatggagtttcgtattgttatttaggttggagtgtagtggtataattttagtttattgtaattttttttttttgggtttaagcgatttttatgatttagttttttaaataggtgggattataggcgtacgttattatgttttgttgatttttgtatttttagtggaggtagggttttattacgttaggtagtttggtttcgaattattgattttaagtgattcgtttattttagttttcgaaagttttgggattataggcgtgagttatcgtatttgattttagatattttttttaaaggtttatattaaattttattttttagtatattaaggattttttttttttattgaatttattgtgtatattttttagattatatatttggtttttttttggtttatattatattttttttttttttagttttaggaataagggattggttgttttttagttgtgtgtagtagtgcgtaggatttattttgtatggggtaggtatatagtttttttattattagttgtgggaagtataggggtgaagagtgtgggtttttttaattgatttttcgtgttttaggtggtgtgggttggaagatacgggtttgtatgttagagggtagattggtataaatgggtagtattaggagttttcggattttggagtttaggcggcggtagcgattttggagtattttataggtagttttaatttttttttggatagagggtagggagagtagtaggggttttagagttatagaaggttaatatgtcggttttgtttttttttgggatatattattttttttttttattatgttaggtatttgttttgttaggaatattaggatatttttagggggttgggttatatggatttgtaatatagatattatataagtttttaagtagttagtttttggagtttggagagtagaaagagatggggttataggagggttatttgtttaggtaaattttttttttttttttaatttaatatatattttattttagtttttttttgaattttttattttatttttttttttataggataattttttttaaaggttttagtttttttgttatagatttaagtttattttttttgagggggtattttggtgtagaagatgtttataggaaatttgcgttcggggattcgaaatataggggcgttattaaagaaggtggaaaaacgggtagtgtttattgtggttgaagttattaggattttgagtttaggtcggaagcgagtaatatttttgattaatttaaagagaatgtttgtgtgtagggttttttcgtgtgttttatttattattattacgttggggagggaataggagagtaatgagggaagagcgttaggtaatgtagtattagatattagggttaattggatgagaggggagtaatggatataaagagtttaagaatgattgttgacggagggggttttaaggagaagttagttattttatttatgtagagtaatagaaagttagagaaggttagggttttatgatttgtaatttattttagttttagtagataataggagataagatgtagaggttgtatattgaggttaggataagttagttatattttttagtttagttaagagtttgtttagatttagtagttgtttttattagaaaaagttgaaggatatgttttaggttgggtatggtggtagtttacgtttgtaattttagtattttgggaggtcgaggtaggtggattataaggttaggagttcgagattagtttggttaatatagtgaaatttcgttttttttaaaaatataaaaaaaattagttagatgtggtggtagacgtttgtagttttagttatttgggaggttgaggtaggagaatcgtttgaatttgggaggtagaggttgtagtgagttaagatcgtgttattgtattttagtttgggtgatagagcgagattttatttaaaaaaagaaaaaagaaaaagtggaaggattttttttttgagatagttttgttttgttgtaggttggagtgtagtggtatgattttagtttattgtaagtttcgttttttgggtttatattatttttttgttttagttttttaagtagttgggattataggtgtttgttattgtgtttggttaattttttgtatttttagtagagacggagttttgaaatagagttttattttgtcgtttaggttggagtatagtggtacgatttcggtttatcgtaagtttcgttttttgggttgcgtttacgttatttttttgttttagttttttgagtagttgggattataggtgttcgttattacgtttagttaattttttatattttttagtagagacggggttttatcgtgttagttaggatggttttgatttttttatttcgtgattcgtttgtttttgttttttaaagtgttgggattataggcgtgagttatcgcgttcggttgatacgttttaaaggaaaaaaaaagtggaaggtagggttttttttaataagggtgggttagtaaggttgattgggggtaatagatttgagttgttgtgatttaaatagtttagaagtttttggtgttttgtgggataattgttgttggtattatttttgattgtttttttttttggagataggagtaagttaagtttttttattttaatttttataggattttgtatgttttttggtttttttttaatttagttatgtgtatgatattttttttttttttgttttttggtttttttgggtggtagttaagttttaggaatttatttttatttttttttatttatttttttgattttaattttttgtgtttaattttaattgtgatggtgaagtttttagttattttataaagtaggttggttcgatgggtaaaaatatttgtattagatatttttgcgttggttggttttttatgggtttttagagattttttgtaagggatatgaaggataaaattttatttgtttaattgttttattgtgattttttaagattagaaatttatagtttttgaagagttaaaaaggtatatattgtttagttggtttgattttatttttattatatttatgaatttttttttttttttaatatatgtttaattaatttttgtttggttatttttagtattaagagtttattatttatagattaagttatttaagatttgtgtggagggttaagatttagagtttaattattttgataggttttgtaatttttattattttgagggttatttagttattggtattgagttggaatttgtttttttgtaatttttttatggtttttagttatgtcgtgtagggttatataaaataatttgatttttttttttatgtaatagtttttatatatttagagggaattaggatgttttttgtttttttttttgagttgagtattttaagtgtttttaaatggtttttatacggtattttaagtttcggtagtaatgttttgttattttggttgttttttaaattttggagatgaatggggaaagaagaggttttttttataattttttttgttttttagttttattttcgtggtatttggaggttagtttaaggattatttgaattataaagatttaagaacgggtggattaattagaagataatggttgaattggttgggtgggaagaagggagagaaaggttagagattagagatatttgtaattcgttaggttaggtttagagaggaattttcggagaagtattttatttgttatgtagcggaggatagttcgttttgatgtgtagtttttaaagcggatgttgtagttaatttggttaagggaattattagtaattaagtgtgggttggtgtgttttgaaaggaatttggggaaaggtgaagtggggtagtattaagatttttgttgtagggatttgagggaattgtagattgagttatagattttagattttatttttcggttttttagaaattttattttatttttaagttttatatttatttttcgggttattcgggcggttatatttatggtagttatttttcggggttgggtgtaggtaatttttatatttttgtttgtataattttgaatgataaagaaaaaagaagaagtttgttttttattaaatatgtattttgggattaggtatattttagagaaagaagttgtaaaaattaggtaggagaaaaggaggaaaagatagatgttgaaaattagaaaagaagggtaaatagataggatgatagatttagggtttttaaagggggtttttatttagttttgggtaattaagtttatgattttgttagatttgagttggaaaagaatagattagttgagatagagttagttaaggtaaaaaagtaggaaggttgggtatagtggtttatgtttgtaattttagtattttgggaggttgaggtgggaggatggtttgagtttaggagttcgagattagtttgggtaatatagtgtgataaaaaaattaaaaatttaaaattttgattaggtatagtggtttatatttgtaattttagtattttgggaggtcgaggtagacggattttttgaggttgggagttcgagattagtttggttaaaatggtgaaatttcgtttattaaaaatataaaaaattagtcgagtatggtggtgtatgtttgtatttttagttatttgggaggttgaggtaggagagtcgtttgaatttgggagatagaggttgtagtaagttaagattatgttatcgtattttagtttgggtaatagagtaagattttgttttaaaaaaaaaaaaaaaaaaattttaggttaggtatagtggttaatatttgtaattttagtattttgggaggttgaggtgggtagattacgaggttaggagattgagattattttggttaatatggtgaaattttatttttattaaaaatataaaaattagttgggtgtggtggtacgtatttgtagttttagttatttaggaggttgaggtaggagaattatttgaatttaggaggtggaggttgtagtgagttaagatcgcgttattgtattttagtttggtgatagagtaagattttattttaaaaaaaaataaaaaatgtttaatatgggtatggtggtgtgtattttttagatatttaggaggttgaggtgggatgattttttgagtttaggagttttaggttgtagtgagttatgatggtgttatattattttagtttgggtattagagtaagagtttgtttttaaaataaggtaggggttaggtatagtggtttatatttgtaattttagtattttgggaggttgaggtggttggattatttgaggttaggagttcgagagtagtttggttaatatggtgaaattttatttttattaaaaaattagttaggtgtggtggcgtatgtttgtaattttagttattttgaaggttgacgtaggagaattttttgaatttaggagttagaggttgtagtaagttaagatcgtattattgtattttagtttgggtgatagagtaagatttcgtttttaaaaaaaaaaaaaaaaaattaataaaaaggtaggaaaatagttttttaattttttgttttttggttacgttggagtatagggaggtttatatttatatacgttttattttatttatttatttattcgtttttttaaatgaaatgaatgtaggaagtgagaatagaaatgtgaaaagggtatggtttttatttttaagaattttataatttagtggaaaagataggtaagtgattattaaaaatataatgtaaaaggagttttgataggaatgaggatattgatgttaggtgttttggtaagttgaagggtgagatgattgtatttttttaaagagatattgcgggatttgggtggttttttttgagtttgtttcgtttttaatgatgaggatttggtgatttgtaatagtagttaggagtttttttcgaaatgggaatatcgggaggttgcggcggacggtttggatggattttttttgttgggtttgagttgaagtgggtggagttgacggtttttaaggaaagagaaggaggtgtgagttaaatagttcgttacgggttttttttagaaagttttttagttttttttttattttattattttggagttgagtggttcggataaatttaatggttttttttttttttagtattagttgatatttgggtttttgagaggtagtatttcgggttttaaattttagggacgttgttttaagtcgcgtttttttttagcgtcgttgtttttttttaggggtttttgattttttttttattagatttatagttcgggttggttatagagagaggggatatgtgaagatttaaaaataggatgttttttttgtttttttttttttttttattattattttcgtttattgtttattgggaacggtaaggtaagaaaggggatgatttacgtgttgtttaattttttgaagttttttttataatttgttttggggattaaggttgaagtagacgtcgttttattttatttgttttcgggtttttttgggtatgtggtagcgattggtggtttttagttttttttgttttttagttgttcggtattttcgggcgagatttcgtattcgtcgtttatatttgagtttttgtcgttcgtgtcggtttagttttacgtttttaaaaaggaattttttattagttagtttcgtttttaggtttttaagtttttttcgttttcgtttagttaggtattttcggcgagatttttttcgtagtttagggatttgagttgggaaaggatagtcgaatttttattttgttggaggagtaatttttttttttattaatttttataagggaaaaattttttgataggtaggtatgagaattttaggatgtattttttattttttttttgtaatgtataattaaaataatgatatatttaaatttgggtttttttggatgttatatgttgattttatatcgtatttttttgtagtagaatttagttggaaagtttttttaggtagtattattatttttgttaatatagatgtattagggagatgtttgcgtagtttatattttatttttgttattttatttaaattagtggaaagggggaaaataaaaggttaatttagcgtttagaagtataggatttaaatcgaaaataatttagataaagatagaaattagtgagggggttaataggaggtaatttttagttttagttagatgttttttggttttaaacggaatgattgtagtttgaggaagggagaaaaattgattataaaaagttaggattatagtattagagtgtttttgtaaggtaaatgtaattagggatgtttggttttttggtattaatttttttttattatgttgtgttttatttagtttttatatatttatttttgatataaattttttaggatatattatggatgatagtagaaaattggtaatatttataaggtttttttttgttaggagtttttttattatgatattattttttttgtgattataattttttttattgtaaggttaaagtttttttggtggttgggtgggcgtggtgatttatatttgtaattttagtattttgaaaggttgaggtgggtggattatttaaggttaggagttagagattagtttggttaatatggtgaaatttcgtttttattgaaaatataaaaattagttgggtatggtagtgggtatttgtaattttagttattcgggaggttgaggtaggagaatcgtttgaattcgggagacggaggttgtagtgagtttagtttacgttattgtattttagtttgagtaataagaataaaattgtatttttaaaaaaaaagtttttttgttgttttatttttaaggggtttggttttatttagttgtttggttttttttgtttgttttgtaaagatttaaaatgtagtttatgattatgatttaatttgggtattatagttaaatattttttttatggaagagttagatagattttttttttaatatgggtaaaaaattagagttatttgagtattaaaaagaataatgatgtgagattataaaatattgaaaaataaaaatttatgagtttaatttgatatatataaataaaaaataagggaaaaaaatttgttattagtgaaatgattgttatagtaaacgttttattttaaaaattcgtatttaaaaggaaataaatatttattttttttaagaaggaattgtagtttgtttttagttgttgaggaaaagtttttttttatagataaattttagttaatatacgtaataggaatgatagaattaaaaaattattatttcggtcgggcgcggtgtttacgtttgtaattttagtattttgggaggttgaggtaagaggattacgaagttaggagatcgagattattttggttaatatggtgagattttatttttattaaaaatataaaaaattagtcgggcgtggtagtaggcgtttgtagttttagttgtttaggaggttgaggtaggagaatggtatgaattcggaaggtagagtttgtagtgagtcgagatcgtattttgtattttagtttgggcgatagagcgagattttgttttaaaaaaaaaaaaaaaaaaattattattttgtaatttttaataaaaataatatgtttaggaaaggattattagtggtttttaaaagtatttgatgaaaggttattggtagaaaggatattaatattaatatatagatatataattggatagtatgttttcgtgatatgatataatatgaagtgtatattatcgtttaagaagtgtttttgttataattgtttaatttgagtgttaataagttttagatttaatttttgttttaaagaaagtatagggtagagaagtatttaatattataagataagaattaggtaaatttagaatgtaggatattgtaaggtgagatagatagagagagaaataaatttaatatttaagatttaaatgtaatgtatgaattttgattgtatttttgttaggaaaaagtagttattaaagttattttgagggtaatgagggtattttttattgtagagagattttagtcgatatataagaattattgtttaattttttgattgtgataagagtattttgattttagaggataatatttttatttttagtaggtatatattgatgtatttagagataaaacgttatgatgtttaagatttttttaaatggtttgaaaagaaaaaatatattatatttataattataatgtaaatattatttatagtattaattattttttaatttgaatagtgtttatgagtgttttttgttttatttttttaatttttttatgtgtttaaatatttttgtaatcgaaaaagaaaaattatagttgggtatagtggtttacgtttgtaattttaatattttgggagatcgaggggggtggatcgttaaaggttaggagtttgagattagattggttaatatggtgaaattttatttttattaaatatataaaaattagttaggtatgttagtgtatgtttgtagttttagttgttcgggaggttgaggtaggagaattatttgaattcgggaggcggaggttgtagtgagtcgagattatgttattgtattttagtttgggcgatagaatgagattttgttttaaaaaaaattcgaaaaattaaatttaggttaaaatagtaatattattattattataattgtattgagatgttttagaagtttaattatagttaattttaggaagagatatgagataaattggttaggagagatttgggaattagtaggttatttttagaattttaaaagttggtcgggtacgtggtgatttacgtttataattttagtattttgggaggtcgaggtaggtggattatttgaggttaggagtttaagattagtttgattaatatggagaaattttatttttattaaaaatataaaattagttaggcgaggtggtttatgtttgtaattttagttattttggaggttgagataggagaatcgtttgaattcgggaggtggaagttgtagtgagttaagattacgttattgtattttagtttgagtaataagtgtaaaattttgttttaaaaaaataaataaatgaattttaaaaagtaaaaagggttaggcgtagtggtttatgtttataattttaatattttgggaggttaaggcgggtagattataaggttaagagattaagattattttggttaatatgatgaaattttttttattaaaaatataaaaaattagtcgagtgtggtattgtaggtttgtagttttagttatttaggaggttgaggtaggagaatcgtttgatttttttattagggaggtataggttgtagtgagttgagatcgtattattatattttagtttggtaatagagtgagattttattttaaaaataaataaataaaaataaaaaataaaataaaataaataaaaagaaggttgggtatggtggtttacgtttgtaattttagttttttgggaggttaaagtaggtggattataaggttaggggttcgagattattttggttaatatggtgaaatttcgtttttattaaaggtataaaaaattagttaggcgtggtggtgtgcgtttgtaattttagttatttaggaggcggaggttgtagtgagtcgagatcgtattattgtattttagtttcggtgatagggtaagatttcgttttaaaaaaaagaaaaaaggtttaaaaaaaaaaaaaaaggaattttaagagttttaaaattttattggggtattggggaatttaagtgtgattttatttgataagattaggtttttggaaaatagtttattttatttagttttatattataaaaagtttagtttatgaattataagggttttgtttttgtttagtgagaagatatagggagattataaagttatataaggggtgtaggaattaggtggtgggaaggtatttggagatggtgtgtttaagttgaatggttagtatatttttgtatagtgggattgttgttttgtttttgttttttagtaatttttttgataatattttagttgttttatattttattaggatttaggaatagggaaagtttataattttatttattaatagagtatatttgattttaaagttaagagttaaggaggatttatgggtagtttttttttttttataatttaagaaggattttttttttaataatataagtttatttttagttggtttttaataattaagttttttttttagaaatttgattattttattagtatttatattgtgttttttttgtattttttttttttatatattttattagaaagtttttttttttgttttttgattttggttttttaggttttgggatttattatggtttttcggtttttttcggttattttgaggcgtttttgagtttttttataagtttagaagaaaaaataagaatggaggggtgtgaggttaaagagtttttatattgatagttgtttttttttagaattataaggattatttagatgcgttttaatataaaaaatgtttttttttagtgaggaatttttttgattgtaggtatagtagatagttgttttagttataggatgtatagggttttttttattatagaggtgaatattttattagagatagttttttgtttttttagagattattatttttgtatttatagttaattttagattttattttgggattttggggatttatagaatatgttgtttttatttatttttttgtttgatcgttttaggatatttcgagttcgatttttgtttcgttgtcgaattcgtttagtaaaggtattacgtttttttaggttttgaaggcgtttacgttttgttcgtttttatttatttttcgattttggtttttttgtttgttgtttattttttttgtagtttatttaggggattaaataagggtatagagaatattttagtttgttttatttttttttattttgtttttgatttattttgtttttttttttttttttttagaagttttttttttttttttttttttacgtttttttttgaggtgttttcgttttttacgttttttttggaggttgtttttagttttatttatagtttttttattgttttttttattgttttttagtaatttataagatcggtttttttttagtagggttcgggtttttcgttttgttgttcgagttggtttttttattattgtttttcgtggtatttgttagtagaggggaagataaggaggtttgagtaatttttgatttttgtttttttatttagttttgtttttaatttaagtaattatttagttttttttgttttcgcggttcggttttattgttaggtaatggcgtgatttcggtttattttaattttcgttttttaggtttaagtaatttttttgttttagttttttaagtagttgagattataggtatatgttattacgttcgattatttttgtatttttagtagagatgaggttttattatgttggttaggttggttttaaatttttgattttatgatttatttattttagttttttaaagtgttgggattataggtatgagttatcgtattcgggtataattatttagttttaaattagttaattagtatttatttttttttttttttatggttttattttatttttattattttgaatggggttttttatttttttttatagatagggttttattttgttttttttgggtttaagggatttttttattttaggtttttaagtagttagaaatataggtgtatattattacgtttaattaatttttaatttttttgtaggacgaaggtttcgttatgttgtttaggttggtttcgaatttttgggtttaagtaatttttttgttttagtttttcggggtgttgggattataggtgtgagttattgtattcggttttttttgttaattaaacgattgaaaggaagtttagaagatgaggggggtcgggtatggtggtttacgtttgtaattttagtattttgagggggttgagagaggattgtttgagttgaggagttagagattagtttgcgtaatatattaaggttttatttttaaaaataaaaataaaaataaaagatattagtcgggggtggtggcgcgcgttcgtagttttagttatcggggaagatgaggtgggagggtcgttttaattagggaggtcgacgttgtagtgagtcgtgattttacgatcgtattttagtttgggcgacggggcgagcgagattgtgttttttaaaaaaaaaaaaaagaaagaaagaaatgtagaaattaagatttttattgaatcgtaatttgtattttaataagaattttggatgtatgttaagagttcgagaaatatcgttttattgcgtttaattcgatatatttaagttttttttaattttttttattgagttgggcgtttagtagttagtatagtatttacgcgataacggataaagaataagtgtttgtgaattgagtttttttaatttttcgatggatcgttaggttagttttatcgggataaattatagggtttttttttatttttgtcgatattttgttttagagttttagggcgaagtttcgggtcggtttattgagatttaaggtattagtgtttcgtaggcgttgtacgaatttttcggtagaggtgtagcgttgtgcggtatcgattagaaattgggcgacgtgtcgttcgtttagttttaatatcgagtgtagttcgttttgaatttagcgttttagattcgtcggcgtcgttatggcgatttacgttttttgttttcggttttgaagcgtcgggtagtcgcgtttattgttgggtcggttagaggtttggagttttcggttggagttttagtttcgtaagttagttattttgggatttttaggatttttcgatattttaaagttgttttttcgtatcgcggagttcggaaggggttgtattttttcggtttttaagtattacggtggtcgagcgagtttaaatttcgcggaattatatttgaaaattcggggtaatttttttttttttatttcgtttttgtttagtttttttgacgttttttgatggttagtttgtgagtgtttcgtttacgtatttatttaataagtgaaattaatttaatggatgtttaatgtgtgtttattgtttttcgtttttgggatatagtagaggataaattaaaagttttttattaaatttatattttgcggtgggggagggataggatatataataaagaaagtatggaaattttatagagttaaaaattatataaagtaagggaggaatgaaattttattttagattggaagatcgggtttatgtttataaaatatattagtattgttggtcgggcgcggtggtttatgtttgtaattttagtattttgggaggttaaggcgggcggattatttgaggttaggagttcgagattagtttggttaagatggcgaaattttgtttttattaaaaatataaaaattagtttggcgtggtggtgtgcgtttgtagttttagttattcgggaggttgaggtaggagaattatttgaatatgggaagtagagtttgtagtgagtcgagattttattacggtattttagtttgagtaatagaggaagtttttgttttaaataaataaaaaagtgatcgttgttaggattggtttgtttgtagtaggagtgaagataggttaggtataagggaagatttttaggtaggaagaaattggggaattggggaaagttgttaaagataaaatttttaaattaaggaataggtaaattgtgttttgtatttttgtttaatagtttgagaaaattattggtggttgtttatttaaaagtaagtaaggttaggtgtagtggtttttgttgtaattttagtattttgggaggttgaggtaggaggatattttgagattaggggtttgagattagtttgggtaatagggtgagattttattatttttataaaaaattagttaggtgtggaggtgtgtatttgtagttttagttattttggagattgagataggagaattttttttttttttttggagatagagtttcgttttgttgtttagattggagtgtaatggtacgatttcggtttattgtaattttcgttttttaggtttaagtgatttttttgttttagttttttgagtagttggaattataagtgtgataagtatatgttattacgtttagttagtttttgtatttttaatatagatggggttttattatgttggttaggttggttttaaatttttgattttatgattcgttcgtttcggttttttaaagtgttgggattataggcgtgagttatcgtattgggtttgagataggagaattttttgagtttaggagttagaggttgtagtgagtcgaggttaggtattttaatttaggtaatagattaagattatgtttaaaaaaaaaaaaaaaaataaaaaaaaaagttgaatttgttattcgatgttttgttgtttgatttgtttgattttgtattatatttttgtgattaattgtagttattaggtattattgttaggaaatgaaatattgtttttattaatagttataagtggatttatattattgatttttttttttttttttttggaaagggagtttcggagttttattttgtcgtttaggttggaatgtagtggcgtgattttggtttattgtagtttttattttttgggtttaagtaatttttttgttttagttttttgagtaggcgggattataggtgcgtgttattacgtttagttaattttttgtattttagtagagacggggttttattatgttgtttaggttggttttaaattttttagatgaggtagtttattcgttttggtattttaaagtgttaggattataggtatgagttattatatttggtttgattttttgaatgtattgttttttgtttttgagatggattgtgagtatttttggtatttcggagttttttaattttgtttttttgggttataattggaaattttttaagatttttatttaataggttattaatataattattttgtttttttttttatttagattttttttgaattggttgagttttttgatatttggtttgtttttttgttagtaaattgaaaatttttggcgtatgtttaagtttaatttgttttatatattttgttttatagtaaaggtgtggggttttttttgattagtttgagaggagtaatttgtagtggtagaaggattataattatttaattatatttttgttagtttggagagttaataataaataaataaatttttttgatgagtaaaatattgatgttttatatttgtataagatattttttgaaatgggaaaattttaaatattaattatatgggtattaaagttatgtattattaagatggtttttaaatttttttttttttttttgagatggagttttattttgttgtttaggttggagtgtaatggcgtaattttagtttattgtaagttttatttttcgggtttatgttatttttttgttttagtttttcgagtagttgggattataggtgtttattattatgtttcgttaattttttgtatttttagtagagacggggttttatcgtgttagttaggatggttttaattttttgattttatgattcgtttgtttcggttttttaaagtgttgggattataggcgtgagttatcgtgttcggtttttaggtttttaacgatataaaatttattgtttattagaggggaattttttttaggaaattgatttttgtatatatttattttattttgtagtaattttagatttagtattcgtagttttagttttttaagtaagtatttttggattagttatatgggttgtgttatatattatttagttgtttttatggtagtaggtttttgaatattagaattttttaatttaaagtgttttttgtaatattttaattttttttttttatttatttatttgttgttatttattttagaaataatttcgtgtttattagttgataggtataggatattgtagtgaatttagttgatgtagttagtttttatggtatttttagtttagtggatattttaattgtttttttttatgttatttgtttgttttgcgtgaaatttacgtgtagttttttagattttttttgatatgttagtgtcgagtttttggtttattttttattattttttttttttttagttattagagtttttttttatatatttttttttttttttaaagaaggagaagtagacgagttgaagagaattttattttattatggaaagttaaaaaataaataaaataaaataggtaattgataaaggcggtataatggggaaggagaggtgaggtgtttttttagttattcgatattattttaatttagtttaattgtgaattattaggagaaatagaattaaataattattaaggggtatagagttaagagttttagtttttttttttggggaaaattaaggtaaagtaatattgagaaaaagtggaggaagttatatttttaggttattttaatgaggagattggaggggatagaggagagaattttacgtagatatagtaagtaagcgtggtttgtaaatttgggattttggtaggtggggttgggagttgatggaatttgtaaattaggttgtggttaagggaggaggtaggagttgtaaataaaggggtagtgatttaggaaatgaaggagatgtgtttataaatggagtggggtttgggttttttagagagacgagtgtttaaatttcgagagtttttacgggatggtggggaggaaggttgtggggagagtgtattttgttatggggggtaggtgttttatttttattttttagggagttttgtgtttttttttaggatttggcgtttatttttggatgatttaggatgtattagtacgtttaattttatttatattagggattttggattagggtagaaattgggtaattggttttgtttttagaaatagggtggggaaagtaagttataagatgttggttgtttttttttgttaggtttattattagggtttgtttgttttgaatttttcgggttttaggatttttagttataagaaggagggaggtatatttttatgttggaagatggttatcgtcggtaggatttatttgtgggagagggggtaataatgttagagaatgagtgagagtttttgttttttgtttattttttttttttatataaattgaagggtagttggtatgtaggaagttttataatattttttatatttaaagtatgttattattagtaattatatttattatttatttagttcggattttgtgttaggtatttttataattgtttaattttattataattttaggagagattaagtaatatgatatttagttgtggtttttggtgttttataaaaaattatttaattttggtttggagtatttgtaatttaagtaatttgggaggttgaggtaggaggattatttgaggttaggagtttaagattagtttgattaatatggggaaattttgtttttattaaaaatataaaaattagttaggtgtgatggtatatatttgtaattttagttattagagaggttgaggtataagaatcgtttgaatttgggaggtagaggttgtagtgagttaaggttgtgttattgtattttagtttaggcgatagagggagacgttgttttaaaataaataaataaataaataaataaaattatttaatattttttataagtttaggaggtagtttttggtttttgtttttttgagatagaattttattttgttatttaggttggagtgtagtggcgttatttcggtttattgtaatttttgtttttcgggtttaagtgatttttttgttttagattttcgagtagtagggattataggtgtttatttttatgtttagttaatttttgtatttttagtagagatgggtttttattatgttggttaggttggttttgaatttttgattttgagtgatttatttgtttcggttttttaaagtgttgagattataggcgtgagttatcgtgtttggtttgtttgttttttttgagataggtttttttttgttgtttaggttggagtgtagtgggtggtgtaatattggtttattgtagtttttaatttttgaggttaaacgatgtttttattttagttttttaagtatttggaattatagttgcgtattgttatatttggttaattttttttttttttttgagacggagttttattttgttgttaaggttggagtgtagtggtacgatttcggtttattgtaagtttcgttttttaggtttacgttatttttttgttttagttttttaagtagttgggattataggtgttcgttattacgtttagttaatttttttttgtatttttagtagagatggggttttatcgtgttagttaggatggtttcgattttttgatttcgtgattcgttcgtttcggttttttaaagtgttgggattataggcgtgagttatcgtgttcggtttatatttggataattttttaatttttttgtagagataggattttgttatgttgtttagggtggttttgaatttttgggtttaagcgatttattcgttttggtttttcgaagtgttgggattataggtatgagttataggaggtagttattattaattttattttataaataataaattaaagtaagagattagatggtttttttgagattatataattaaagagataagttggaattttaatttaggtttgtcgatttattttgtgattttgattagattatagtatttaggaagagttttcgttttgaaatttgaagatttaatgtgtattttattgtcggggattttagtttgtttatttgttaaaggagtatgttgaattagaggattcgttaagtttttttcgagtgtttatatgtaattttttttttttttttttggattatagcgttcgttttgatagtagggggcgttttcgggtcggcggagttttcgtttatttataattagggttttggtgcgtagttcgttttggagttttggttgtagtagtagtagtttttttttatttttttcgtcgtcgggttgggttgttggagggttgggggtattggggattttaggtttcgggtttagtttttttagtatcgaattttcggaggggtattggtacgtggtttttagggttgtttcgttgaaggagattttaagttgaaggagggagaaaaagggggtaggaggtaaggttagtaggggagaagttcgcgggggttgagggagagaaagcgggggcggggggggcggagtttgtaagggagtaggtgggattggcggaacgtgggggtgggggttggatttaggtgttttatttattttttttatttattttgggatttagtttttttttttatattggttttttaattttagagttttttttttcgattatattattttaaaatattagattttgttttgtacgttggtaggggtttgggaggtagaagtgaataatataagattaaggtttttgttatttcgagtgtgggaggtagaggggtaaaaagaaattaaaatatatggcgataagttttgtgattagaatcgagtttttgggtattttgggggtaatcgagtgaattttttagaggagtttagtagattggttagtggggaaagaattggttggggagcgagttttagataaaagtaaggtttttatatttatagttttttgttgttttatgtaaaatttaggattttgggtatttgtttttttttattttttttattttttttttatttatagtaaagggagtttagggtttaggaagagatgggagatgaatagaaaggtcgagaggaattaagagattttagtaatatataggggaaagatgagttattgatattttgaaggttgggggagatgataagggtagaaaggaaagtttatataaatttggggtgggggtttatagtgtgtttaaagggataggtatagagataaaatattagatagggtatagaaaatttttggtaattatattgttttaagagtaggcgagttttagttgtttttattgtttttttattttttttttttgttttattaagaagtttagggggaaggggtagggtgggattaagtttaggagttaaagggattagggagatagtaggaggattttatatgaattatttggaaaggtttaaatgatttatttaggttttttttggtatttgtttgggaagatttggggttagtcgtatatttttgagttttttaatgaattgaggtatgaaaagagagaagttagaagggtggttgggtaggtggttgttaagagttgtattaatatgatattagttaggtatggtggtttatatttgtagttttagtattttgggaggttgaggcgggaggattttttgagtttaggagttcgagattagtttgggtaatagagtgatattgtttttaaaaaagaaaaaaaaagaaaattagatatgatatttgggtttttatgggaaggtagaatttaggaattgtatatgttattttttgttggttttgaattttgtagtgtttttttattttatttggagtaaaaagtttattttaggttgggcgcggtggtttatgtttataattttagaattttgggaggtcgaggcgggcggattataaggttaagagattgagattattttggttaatatggtgaaatttgtttttattaaaaatataaaaaaattagttgggtatggtggcgtgtatttgtagttttagttattcgagaggacgaggtaggagaattgtttgaattcgggaggcggaggttgtagtgagtcgaggtcgcgttattgttttacggtttgggtaatagagtaagattttgttttaaaaaaaaaaaaaaaaaaagtttatttgattgtttttaaggtgtttagagtttgattaaagtttatagggtgtttttagtatgttattttttttttgtttttttggtttttttttttattttagttatattggttttggttttttttacgtatttttattttaggattagaatagtattagttattttttttgtttggaatatttttttaaaatatttttatggttttgatttttttgattattttattttgaagtttttatatttattttttttattttttgattttttaagttttattgttttatttttttttttataattatttattattttttaatttattagataatttattaatatattatatttatgtttgttgttgaaaggagtttggggtcgggtaaggtggtttatttttgtaattttagtattttgggaggttaagataggtggattatttgaggttaggagttcgagattagtttggttaatatggtgaaatttcgtttttattaaaaatattaaaattagtcgggtatggtggcgtgcgtttgtaattttagttatttaggaggttgaggttggagaattatttgaattcgggaggtggaggttgtagtgagtcgaaattttattattgaattttaggttgggagatagcgagattgttttagaaaaaaaaaagaaaagaaaagaaaaaagaaaggagtttagaagttggtataatgtaagaggttagggtttgtttagattttatatgaggtgttattagaggattaatgttggggaaacgatttgcgggtggtttagtttgtatatatttgatttttagtttatgtttgtggaattgttggtagaatttagtgatagtagttagattgtttatattttaagtttttagaagggatcgtttaggtttttgtaattgatagatttatttatatttttgggaatttatttttgttttttttttatatttttttttggaataataatttttgtattttattttttattttgaaaatgatttattttatttgttttcggtttatgtttatatttttttttttattttgtttgtttttttattttttattaatttttgattgggttttttagaaatgtatagtttgtatgggagtgggggggtagagagggggtgatttattcgttttttttttattagttatataaggttataatggggttggttttttagtttaattaagaggtttttggggtagggtattagttatagttattttttgggttttagtggtagggttgggattttttttttgatggtagggataaatttgatggaattagtttgtaaacgagttatttagggaaggtgaagcgggggttggtggtagggtttttttattttttatttttgagttagtgtgttgtagtagagttgggataaggtatttagtttttgaagaatagggtgttgatagggggtagagggtggagggtgaggcgtttgggttagaggaattttgtgttgttttttttttatttttatttaagtagcggttgtttttttatttttttattatattttgagtatagatttggtaggtttagggtttagggtttagggttttttatttagttttattagtttttcggtttttattttaggttttttgtttgggcgatttgttttcggtttttttgttttttggtttaggtatggttattagtataggttttgttttgtatttgttttttggtttttttgggatgttttttgggttttgggttttaaagttttatgtttttttttgtttatttttttttagaggtataagttttttttagtaggaagtgatttttttgaatattttattcgggtagtattttcggatttttgttttttttatttgtttagttttgaggggaataggttggtagtagttagagggttgagggtaggtttttaagaattatggtttagaggtgggagtttacgttttatgtgaagatgaattgggggattaaatgaatttttttttatttaaggtttaattcgtatttttagtttttgtggttttttattgatattgaggatataaaaaaattaaatttgaggatgttaatatatgggatgagaatgagattgggttttttaggttttggggagatgtgtgtgattggagggattttttaagtttgagatgtttgagtgtgggatttttgtttttttagagatttttaagttggaaatagatggatgtgtatagggaagaagtgaggttagggttagggggagttattttggttgtttttatttttttgtaggtttttgttgtaagtttaatttttgattttttgttggttttagttttaatttttgtttagaatttttattgtgttttttggttagtgtttgtttttaaaattgtttttaaatttattttttttttttgttattttaaggggagggaaagtttaggatggtaggaaaagaggggaaaatcgatttttgagttagtttttgggagggaggggaaatttagggaggaaggataggggagtgaggggcgggggtattttggaagaggagaaggttttttttgttttaagagagaagggagtattgtttgaagtagtggtttagttgggggtgtgtaatttcgaggttatttattttaaatggtttttttgtgttttttttatggggtagattcggggtttaaaagttttttttttgttttttggtcggttcggttttatttttttttttttttttattttaggatgtttttatttagttttgtttttttttttacggggtagttggatttttttttatttatttttttttgtagtttttttttagaatataaatttattttattttttttattattttaggttttttattttttttttttagaaaaattgtaagtgtttttattttggtgattttgtttttattgatttaagttcgttattttaggtttttttattggatgggttggggtaggttatatttaggaaaggaaggaaagaaaagggggttggaaatttagagtttaagggaagggagaatgagtagtttggtatattttgaaagagatatatttagagatagtttttgttggggtaggattttttgggtttaaaatggaaaaggagggttttgagaaggaagggtgtatgtgtagagcgaggaagggtggtggtaggaattaataagaaagaatagaggaagataagaaaataggggtataaaaaagaaagagattagagtttagagaaaattgataagtggatttttaagaagtttggtttggttgtttttttatttgtttgtggtgtttttcgggggattttttggtaaggtagttgcggttgagacggaggtagttttttagaattaagattttttcggtagttgggtatcgtttttttttagttttcgggattgtagtattaattgtggttggagaggttggggtggttggggtcgtagggggtatagatcgtcgggggttgacggtgaaggtgtgtttattgcggcggggggtttttatttttggttttgtttttattttatagaataggcggtttatgaggggatttttaggaggttggggggtagttggggttgggggtgggggagatagaggggttggtggtgggggttggagttttattgttttttttttttgttgttttaggtttttagttttagcgttttttggtgggaggggggagggtatagagtagtagttttgtagggtttttagaggtttgttttgagttttcgtttttttttttttagtttttttttttttagtttttatatcgggagattttagaagtttttttgttgattttggaggttttagtttttgagtttgagtttttatgtttttgggtgtttattttcgagttttttcggagtttagggtttatttttatttttttgttggttttatgtttttttcgttattttttataggtttttgttttgttgtttttatttttgcggaattgttgttttgggttttttttgttagggtttcggatagttttgtagttttttttggagttatttttggaattggttatttttttttttttttatattttttcgagtagttttgtttttttttttttgattttagtttttattttgttgtttttagttgtattaaattttgtttttgagattttttggagttaggtttttatttatgggtttttgttaggtttaatttttggtaggtagatttttttgggtttagtttattttttatttttttttttttggggttttgttttcgagattttgttagttttagatttcgttttggagtttttttaggatttagtttttatttttatgtttttgatagtcgggagtttttgttttttattttttttgggttttgtttttagtttcgagtttttagaggttttaggtttaatttttgggttttttttatttttagttttttttttttggtttttttcggatttagtttttttttttttgattttttttttttggggttttgatttcgtatttttttagggttgggttttcgttttcgggtttttagaggtttaggttttttttttgttagtagttttttatttcgttgttgttgttgttgttgttgttgtcgtttttgtcggatgaatcggttttggtgtattggttcgatggtttttagaaggatcgtagatttattcgggtttggaggtttagtttttatagtttttagtatagggttaggttttttaggggatagtttaagtttggttcggcggcgttttaggagttttcgtttttaggttggtatttgggataggcgttttcgttttgttttttttcggtttcgaacggacgtttttttttgtcggcgtcgggttagtagttgtagtttttagtttgggatggtggttatggtcgttttgaggtgagggtagggagtattggggatagagaataggaaggagaggttttagagagtgagatagttcgggggtgagattgagggtgggaggagaggaagtggagggggagaggtgggatataaagtagggtagaggggttaaggatgaggatagagggaaagacggaaggtagagaattggggaaatggaaaaagtgaagagaagttgtgagtttaagttgggggtggtgggggtgatgtgagaggaagagttcggattggaggtaatgagggtaggagttagatgtggtagtatagggttaatgcgtattaaagatcgtttttaggatgtgagaaagagagagaagggcgaaaaggaaagttggcgtgagggagaagagagaaatgtggtaggggtgaggggaatttgggtgtaggttaggttgttttagcgatattttagggaggttagtgtgggaaggaaggattaggaatttttgaaaggattaggaggtaacgggatttgagggggtgttggggaggtaaggaggggcggagagcgaataggtttagaggagaagggaaattagggaagaggggaaaggagggcggcggtagtagtcgggcgcgttttagcgcgggttttaaaggtttcggtttcgtttttagtatcgttcgggttacgtttttttttagtttttatttttttgtttcgtatttcgttttcgaggcgggtcgggggaaatatttattttcgagattttcggaattcgggcgttagggttgttagcgcgtttttagaattttggcgtttatttttattttgttttgttattatcgtttgttttttttatcgattgttttacgcgattttagagtgttaagggtcggttttatgtttttttttttcggcgtttgtaagttttgcgtttcgttttcgtttttatgaagtcgtgatagagtcggtcgtttttatttcgttgtagtcgtatagattgataatttcggtataaagaggagatagttaaggttcgggttagggacgggagtaaggataggggcgaggagatatttattttttaagtttgagttttttagttaatttataggtcgcgggattttcgggggagggggtgcggaggagtcgggcgtttagagagaggaagaggaggagagagggatcgagggagattcggagattggagggaggggaggagggagggagaggaggagggaaagaggtagtaaaggaggagggacggagatagagattagggggtcgggcgggggcggcgatcgttttgtttaaggataatgaggagagggaagggggcgtagggcggagtcgaggagagggcggggtttagattttttttatttcgcgtgggattcgttgcgggattgtttttttttcgttttaattattggtttttcgttttgtttttaggggtttttattagtttttcgttcggatacgttaggtgtttagatttttttttttagttcgtcgatttagggcggtggttcgtgatttaggtttttcgtgggattttgggaggaagcggtagttgtttcgagcggggttcgttttttttattttttgtcgtttttttttacgtttttgtttttttatttgggtttgtaggtttagtttttgaagttttttgttttgcggggtcgagggtagtcgttaggttgtggggggttttgtggatgggcggtaggagaggcgtttagaagttagaggttttggatgtttttttttttattagagttgttgtttcgattttttttagttttaatttgttttttttgggtttataggtcggttgtcgggaaaaaggggatttgaaggaatgggaatggggattcggtcgttttggtaaagtgggggcgggtttgcgggggtggtcgaattttagcggttgttagagggcgtggtggttgtttagattttagttcggtgtttttaggttttttttggtttttttttttaaatttagttttgtagtttgggagatattgatagattgtatgttatatgtagaaaaaggttgatttttatttttttgtagagtatttttttcgggagagtagggagttttaagttatcgagttaagagtaggagaatttttttgattaggttggggtttgagtttagaggtagggtttaaggaggtgtagagattagggtcgggagtggtgaggtaaggttggggtttggagggatagttatgatcgttgaatttgtagattttggtttatttttttggagtggaagttagcggtgtagaaggggatttttgaggcgtagaggtaagtaatagtgttaggggagtggttagggtagatttttttttttttaggaggttgttgagggggagagtgttatgttttaaatagtgaagggatagatgatttttatattttatttttttttgttggtgagaagtggattttggagtttagtggttgaaatttagaatttagggtatggagttggatttagagaataaagttttaagtagtagaaggggtattttttttagtttatggatttgggtttttggtatgaagtagttagggtttggatgttaaggatttagaatttagcgggagaggaagaatagggtttgtaattagagtgagttttttattttgtttttttattttggggtcgagagagtaggtggagttttttttgtagttgggttcggaggtagcggaggttttgttgattaagttcgtgagttaggtttaggtagagggtaaggaggaaagtaaggaggagacggttcgtgtttagggtaggtattatttatagtattgttagtagttttatatatattgggtggcgtaggtgggagaagagtttgagagttcggggagattttagggttagaggttcgtttagttttagtatatggtagtatatttaagagagggagaagagtttagaaatggagttaagttttttttttattttgggtattttttttttttttttttaggtattatttttttagaatttaggtttaggaattttttttttgagatttggatttttgattttgatttttgatttatgtattttttttaggtttaggaggtttatgtttgttgtttttacgagggaaagttaaagggaagggttacgagggagaagtagggagatagtagaagagtatgggaggagggaaatttttgaaagggaacgaggagttttaaaacgggttagaggttataggtagggatttcggagttttatttgtttgaggtttatgagtttagtatagttaaagacgagaaggatgttaaagatgaggagttaggagatgatatggagtataaagtagaggaggggtatttaggtggtttatggtttagttcgagttttttataatatagggtttttgggtatgggtttttagtatcgtattattagttgtggaaggataaggggttgggtattttagtggtttagtttgttcgattttgggagatttagatttagatttgtttttattataggttagtttgtaatttttttttattttttttttaagtattattattaaatatttattatgtggagggtgcgtgttgggtgaggttttaaagatgtaaggatggtttgtttttattttgagaatttatagaatagatggggtgatttgatagttacgtaaagtagtagtttgtgttaattatttagtgaaaagatagataaggttttttttttagatttagggaagtggttttgaagaaagggtaggattgaagagaagggattttaagtaggatataaataaagttgtagaggtgagaagtatattttgtgtttagggaaggataagtatattttttttgataaaaagtaggatatgtgttgtggaggaatggaagttgagattagttttttaattttttttttgaatttatattttgtttttttaatttacggtatttttttcgtatttggttttttttggggatttaattgttaggattttatatttgtaaggttagggttttatatttgtaaggttagggtagtgtaggttatatatagtgatttttgaaggattttaaagtatcgggatgtttatgtttttatttttttagttgttatgaggttgtgttgtttaataaatagaagtaggagttttagattttatgttaggggggtaaggatgttgcggttttgtagggtagttagttatttttggcgggtatttataggaagttgagggaaaaagagataaaagatcgaaatagtggtagaatgttttttttatttttatttttttttggatttttaggttatgttttttattgtttttaagagttttaatgttttttttttaggttgtgtttattttatttttttatttttagtttttgtttttttttttaggttttttgtaaatttggggaagaggatttatagaataatatatgttaggtagttgtaaaaagtatggttggagaggttacgttggattgttttttttatttcggttttttaaatgttttttttttttaatattttttttttaatagttttttttataaaatattttatttagaatatttcggttatcgtttttttcggtttttttagtttttattttttcgtttttttaaaattttaatttttgagtttttaatttagaatttaggttttttttttttgtagtttttcggtcgtttttaaggttcgagtttttttttttggattttttttgttatttgtttttaagtttcgtttttaattttttttttacggttttatttttttttttttagtttattttcgatttttttcgtttattcggattattagatttcgggatttttttaagaagtggtcgaagggaggtaaagcgtacgaattttatttcggtgttaaaggttaggatgaaagaggcgagggtagtagggattaggagtagtgtaggggttatggcgagaaatggaggggtggggaaaggggcggggtcgggattttcgttgttataggtttcgttcgcggtttcgttttcggttgaatttagtttaggagggcggggtttttgtacgttatcgttaggttttcggttcgtttggcgtagttttttttatttagttgtggattcgttttgggatgcgtgtttcggtttgttgttttttcgttatagaagggaatgttagaatttcgagagagagttgttaagggtagcggttttgtagtcgtttacgtgggttgaattttagttcgtttagtttttttatttaaaatgaaaagttattgttttattataaaataaattaatgtatggaatatattgtatagaatataatatatagaataaattttgtaatttattataaagttgagttgttgattggttagttgttaagaatggtaaataatttttttgtaaatattgaaaggtttgttgtaatagtgttagagattgttgattagtaattacgagaataaatatgttaaaatatttgtgatagtaatttttgttagaattaaagattatgtagttaaggattttgttatagtagacgtatatatagtagggattttagatattattagattaattttattaatttatagatagaagaaataggtttagagagataattgtttgagttaggaagttgttaattttgtaggttaagggattagataattgttgagtagtttttcgtaggttttatatttttttttcgttttttgggtttagtatttttatttttttttgaattaatgttgttgtatgttgtattagatattttatgtttttttttgaatttagtttttattttgttttttgttttagtaagttgttttaaatggacggtattaatgaaagttatagtttttattgagaaagttttttcgtcgggcgcggtggtttacgtttgtaattttagtagtttgggaggtcgaggcgggtggattacgaggttaggagatcgagattacggtgaaatttcgtttttattaaaaatataaaaaaaattagtcgggcgcggtggcgggcgtttgtagttatagttgtttaggaggttgaggtagaagaatggcgtgaattcgggaggtagagtttgtagtgagtcgagatcgcgttattgtattttagtttgggcgatagagtaagattttattttaaaaaaaaaaaaaaaaaaaaaagaaaagaaaaaaaaaaaaagaaagttttttttatacgattgttttgtttttatttttttgagtttggaggtgattataatagagttgtgggtattaaggtattgtattattttttttgatttttttatattttgtttatttttttgtaattattattttattaaatttttttttaaattattttaattttattgtgttatttattttttgttaggattatgaatagagatatttattatataaagtaatgtgttataagttatggggtttattggaagtgtaagaggttagattcggtggtttacgtttgtaattttagtaattcgggaggttgaggtgggtggattattttagattagaagttggagattagaatggttaacgtggtgaaattttatttttattaaaaaattttaaaaattagttgggtgtggtggtatgcgtttgtaattttagttatttgggaggttgaggtaggagaatttattgggtgatggagtaagattttgttttaaataaaaaaataaataaataaaatataaggaagtgtaagaaaagatttttaatttttagatgtttaatttgaggtatttaaatagtattatttatgaagagggagtgtagttgagtgttatatggtgttttatagatagtaggtatggtaagaaattaaggtttttggttgggtatagtggtttatagttgtaattttagtatttgggaggtcgaggtagttggattatttgaggttaggagtttgagattagtttggttaatatggtgaaatttcgtttttatttaaaagataaaaattagttaggtgtggtggtaggagtttgtaattttagtttttcgggaggttgaggtaggagaatcgtttgaattcgggaggtggaggttgcgataagttgagatttcgttattggattttagtttgggtgatagagtgagatttcgttttaaaaaaaaaaaaaaggagttgggcgcggtggtttatgtttgttattttagtattatgggaggtttaggcgggtggattacgaggttaggggttagagattagtttgattaatatggcgaaatttcgtttttattaaaaatataaaaattagtcgggtgtggtggtatatatttgtagttttaattatttgggaggttgaggtaggagaattgtttgaatttgggaggcggaggttgtagtaagtcgagatcgcgttattgtattttagtttgggtaatagaataagattttattttaataataataataaaaaaaaaaggagtcgggtgtagtggtttacgtttgtaattttagtattttgcgaggttaaggtgggtggattatttgaggtcgggagttcgagattagtttgattaatatggagaaattttgtttttattaaaaatataaaattagttgggcgtggtggtgtatgtttgtaattttagttatttagaaagttgaggtaggagaattatttgaattcgagaggcggaggttgtagtgagtcgagattacgttattgaatttagtttgggtaataagagtgaaattttgttttaaaaaaaaaaaaaaaaaaaaatggaaagaaagaaattagggttttcgggatatggataattttagagtatgaaagttttgagttgtgtaaggggattaatatttatttgggttatattgtttgttatttttataatggttgtgtttaatgtatattatgagattagatatgtttaatagttagtaaaatgtttggtaaattttatgttatttttattatattaaagttttttaaatttaagtattatttatatgtagaaaagtgtatataagtaattaattattttttaaaaattgaaatttatgtaatataaaattaattttttttttttttgagttgcggtttaggttggagtgtagtggtatgattatagtttattgtaatttcgaatttttgggtaaatggtttttttgttttagttttttgagtagttgggattataggtatgcgttattatatttagttaattttttattttttgtagtgatggggttttattatgatatttaggttggttttaaattttttggtttaagtgattttgttgttttagttttttagggtgttattatgttttgtttaattattttattgtatttatttatttatttatttttgagatagagtttcgtttttattgtttaggttggagtgtaatggcgcgattttggtttattgtaattttcgttttttgggtttatgtgatttttttgttttagttttttaagtagttgggattataggcgtttattattatatttggttaatttttgtatttttaatagagatagggttttattatgttggttaggttagttttaattaaatttttgattttaggtgatttatttattttggttttttatagtgttgggattataggcgtgagttattatattcggtttagtttaattattttaaagagaataatataatggtatttagtatattagtatattagtaataggtataattattatttttatttaattttaaaatatttttttttttgagatggagttttgtttttattgtttatgttggagtgtaatggttgattttcgtttattgtaatttttgttatttaggtttaagtaatttttttgtttagttttttaagtagttgggattataggtatgtgttattacgtttggttaattttgtatttttagtagtgatagggttttattatgttggtttagttagtttcgaatttttgattttaagtgatttatttgttttagttttttaaagtgttgggattataggtatgagttattacgttgggtttttaaaatatttttattatttttaaataaaattttatatttatgaagttattttttatttttttattttttttattttatagttattggtaattataaatttgtttttgttttttatgggtttatttattttggatattttttatatgtgtaattatataatatgtgttttgtttttggtttttttttatttagtaaaatattttgatatttatttttaaaatattgtagtatatattagtattttatttttttttatggttgaataatatttgattatatggatatattataattgtttatttatttatttgttgatgaatatttgtgttgtttttatttttttggttattgtaaaaagtgttgatatgaatatttacgtataagaatttgtttgaataattgttttttttttttttttttttttttttttttttggagatagagtcgtgttttgttatttaggttggaatgtagttgtataattatggtttattgtagttttgatttttttttattttagtattttaagtagttgggattataggtatgtgttattatatttggttaaattttttttttttttttgagagagagtttttttttgttatttaggttggagtgtagtggtatgattttagtttattgtaatttttgtttttcgggtttacgtgattttgtagttttagtttttttagtagttgggattatagttatatgttattatgtttagttaatttttttattattattattattattttttgagatagagtttttttttatagttaggttcgagtgtagtggtatgattttggtttattgtaaattttgattttttggtttaagtgatttttttgttttagttttacgagtagttgggattataggcgtacgttattacgtttagttaatttttgtatttttagtagagagggggttttattatgttggataggatggttttgattttttgattttatgatttattcgttttagttttttaaagtgttgggattataggcgtgagttattaggtttagttaatttttttttttttttagacggagttttgtttttgttgtaacggtatgattttggtttattataatttttattttttaggtttaagtgatttttttgttttagttttcggagtagttgggattatcggtatgtattattacgtttagttaattttgtattttttagtagagacgggtttttttatgttggttaggttggtatcgaatttttgattttaggtgatttaattattttcggttttttaaaatgttgggattataggtatgagttattatattcggttaatttttgtattttttagtagagatggggttttgttatgttggttaggttcgttttgaatttttgattttaggtgatttatttattttgttttttaaagtgttaggattataggcgtgagttatcgtatttagtttatttttgtattttttgtagtgatagggttttgttatgttgtttagattggttgttcgtgaagttttgggtttatgtaatttttttattttggttttttaaattgttgggattataggtataagttattttatttagtttggatatttgatttaaatttttttgggtgtatatttaggagtagaattgttggattgttcggtaatttcgtatttaattttttttttttttttttaatttgagagtaggtattgtttaagtgtttagattagaaaaataattatagtagatattttagtttatttttttaataagtttgttgattcggttttttttgttgttagtatgtttattttttataaaatgggtggtttttttttttattttattttgtggagaggataatttgaagggttataggaagttatttgtttttttgaagtattttttaatagtatagattttaagaattagattttttatgtaggtgatgttatatttattaagagataaagtaattaaagtgttatttgttaaagtaatttgttttttattgatttttgttataattatgttggtagattagtttatttattgattttagttttgggtatttttatgttatatatggttttataatttttagtatgtttattgaagttttgttgagttttataaaggttttattgaagatttaataaaggcgaagaagttgtaatatttttcggatttttgggtttatattattgatatttttgattttgatgataaacggtaatttgggttttgtaggtatatagaagttgttagtttttttggttattttagttattcgaattttagttttgtatatttgtttatattttttgtgatagtgttttatttttttatagataagttttttttttgttttttgaattattttttgggtaaatttttttttcgggtttttgatttttagttttgggaaattttttcgttttttaagggtttttggtatagtaagaatttttttttttttttttttttttttttttttaagacggggttttgttttgttttttatgttggagtgtaatggtgcgatttcgatttaatgtaattttttttttttgtatttaagtaatttttttgttttagttttttgagtagttgggattataggggttggttattatgttcggttaattttgttttgaatttttagtagagacggggttttgttatgttggttagtttggttttgaatttttgattttaggtgatttgtttatttcggttttttaaagtgttgggattataggtgtgagttattgtatttcggtttttttttttttatttataatattttatatgagggttttagttagaaaagaggttatttttttttgtttgttttttttttgagagggagtttcgttttgtcgttaggttggagtatagtggagtagttttggtttattgtaatttttatttttcgggtttaagcgatttttttgttttagtttttcgagtagttaggattataggcgtttgttattacgtttagttaattttttgtatttttagtagagacggggtttttttatgttagttaggatggttttaattttttgattttgtgatttgtttattttggttttttaaagtgttaggattataggggtgagttattacgtttggtttttttttttttagatggagttttgttttgttgtttaggttggagtgtagtggtacgattttagtttattgtaatttttatttttcgggttttagtaatttttttgttttagttttttaagtagttgggattgtaggtatatgttattacgttcggttaatttttgtattttaagtagagacgggattttattatgttggttaggttggtttttaatttttgattttaggtgatttatttgttttgattttttaaagtgttgggattataggtatgagttgtcgtgattggttttttatttttttgagataaggttttattttgttgtttaggttgaagtgtagtggttcgtgtttatttattgtagttttgattttttgggtttaaacgattttttttttagttttttaagtagttgggatcgtagtgtgtgttattatgtttagtgaatttttgtatttttggtagagacgaggttttgttatgttgttcggttggtcgtgaatttttgagtttaagtgatttgttagttttggtttttaaagtgttgggattatatgtgtgagttattgtgtttatttatatgtttaattttttgaggaattattaaattgtttatcgtagaggttgaattatttaatatttttattagtaatgtataaggattttaatttttttatatttttgtaattaattaatttttaaaatttaaatttggttgggtacggtggtttaagtttgtaattttagtatttttggaggttgaggtgggtggtttatttgaggttacgagttagagattagtttgggtaatatgataaaatttcgtttttattaaaaatataaaatttatcgggtatggttgtatatatttatggttttagttatttgggaggttgagaggaaaatcgtttgagtttaggaggttaaggttgtagtaagtcgatatcgagttattgtattttagtttgggtaatagagtgatattttgatttaaaaagataaaaggttagttatggcggtttatgtttgttattttagtattttgggaagttaagataggtggattatttgaggttaggagttcgagattagtatggttaatatggtgaaatttcgtttttattataaatataaaaattagtcgggtgtggtggtatgtgtttgtaattttagttattcgggaggttgaggtgggtggattatttgaggttagaagttagagattagtttgggtaatatgataaaattttatttttattaaaaatataaaaatttagtagagtttcgtttttattaaataataaaaaaaagaaaattagttaggtatggtggtgtgtgtttgtagttttagttatttaggaggttgaggtgggattattgtttgaattgggaggtggaggttgtagtgagttaagatggtgttattgtattttagtttaggtgatagagatgagattttgttttaagaaaaaaaaaaaaattttaagaaatgttatataaattgttttaaatagaagataatgatgaattaaatataagtttatgatttttttttttttaagtttgtgttttgagatttagatattttaaaaaattatattatattataaggtatagagtgaatatttatttattatagaggttaagtcgaagttttaattttataaattttggaaaagttggttagaaaagtatagagatttgtttaaagttaaagttaaagatgtttttagaggttaggagagaagaaaatgttttagtagtattttataattggatttttaaatttatttattttaagtatttttttaagtttttgattttaaagtaagaattttagtaagaaaaaaatagagatggtttttaaataggaggtaggatattatgagtggtatcgagtaataattgtaatagtttggttaaagatagttgttatttatgatatttgagtatgaaattagttaattttaaaatggttatttaatatatgtatgtaagaaattttgtattttttaaatttatataaataaaaaattataaatataaataaaataaaatggttattaaaaaaataaataaataaataaaaaataatttgtggtttttaaattttttatttttttatttatttataaagatttttggttttatttatgttttaggataagttgtattaatatattttaattttttttaacgttttgagtttttttttttatatattttttaattcgtggtttgggagggaaaagggtagtggagtttttaggtggatgatatttttaaaggggagaggataaaggtttttggtttggttttttgttttagtattttagttagtaggaatttaggcgagaggaggggtagtttaattcgtagtggaatggagtaatgagggaagttttgagggtatgtgattataattttttgaggttggggaagatagagtaaaggtaaaattaggtgaaaaagaattttagaaatgggtttaggatttattaattagttttagtattattaaaataatattttttaatatgaagttaagtgaagtatatcgtatattgtttatgaaatatttttgttaggtcgggcgtagtggtttatgtttgtaattatatagtattttgggaggttgaggcgggtggattacgaggttaggagattaagattacggtgaaattttgtttttattaaaaatataaaaaaaaaaaaaaaaaaaaaaaaaattagtcgggcgcgttgacgggtgtttgtcgttttagttattcgggaggttggggtaggagaatggcgtgaaaatttaggaggcggagtttgtagtgagtcgagatcgcgttattgtattttagtttgggttatagagtaagattttattttaaaagaaaaaaaaaagaaaaaaaaaaaaagaaatatttttgttagaggttaggtatagtggtttacgtttataattttagtattttgggaggtcgaggtgggtggattacgaggttaagagatcgagattattttggttaatatggtgaaatttcgtttttagtaaaaataaaaaaattagttgggcgtggtggtgtgcgtttgtagttttagttatttaggaggttgaggtaggagaatagtttgaattcgggagatggaggttgtagtgagttaagattgttttattgtattttagtttggcgatagagtgagatttttttaaaaaaaaaaaatatttttgttagaaagatgaatttgaatttatttaagtttttataattatttgtaatttttaggaaatatggagtatagaggaataagataaattatatgataaggaggtaaatttaaaattttagattgaggaatattttaaaggataagtgatttagtttttgtatgaaatagatggttgggtgggttaagggatgttttagagtaaagataattaagaagataataggtgtggtagtatgtggattttatttgaattttgatttgaataattgtatagagatattttttagataatgggagaaattttattaatggagtgtgagtaaatgattaataaattattgttaattttgtttaggattaataatggtattgtgattatgaaataaaatgtacgtattttttagagatatatatttaagtatgtaggaagaaataatataatattggtagtttgttttaaaatattttagtaaagaaagagaaaggaaaaaaagaaagaataaagaaaaataaaaagaaatgaaatattttagtaaagaaaattaaaggaaaaagtcgggcgcggtggtttacgtttgtaattttagtattttgagaggtcgaggcgggtagattatgattttaggagattaagattattttggttaatatagtgaaattttatttttattaaaaatataaaagaattagtcgggcgtggtggcgggtatttgtagttttagttattcgggaggttgaggtaggagaatggcgtgaatttaggaggcggagattgtagtgagtcgagattgtgttattgtattttagtttgagagtgagattttattttaaaaaaaaaaaaaaaagaaaattaaaggaaaaaagggatagatggagtaaatgtagtataatttaaattaagttgttgttgaatttcggtgattgttatatgggggtattagtagatttgtttttttatttttatttttttttatattataggtttttttttttatttttttattattttatatttttttttgaatttttatttttttttttttaatttttgttattttagttatttttttaattgttattgttattttatttagatttagaatattttaagtatattttataggatcgaggtatgttgggtaggtatgtgtttttatagtagttaataattttttttatttgaggtggtggtggttggattttaggggttatatagattttatagttttaagagaaagaaatgatggagatggtattgtagattgggaagtattggagggagggttgaagtataggttaaaagatagttttttatttttagtagttttcgttttcgagttttgtttagtgcgttttgaaggttaaagttaaagttttttttttgtttagggtcggttattatatatttattcgggggtaagaagaaattagttttgcgggattaaggacggtagtagttagtattaaagtttagtttagttttttaattagttttgttgtttagtatttagagagagtttataaaatgttttttaaattaatgtaggtttttggtttattaatgtttttgtttttttgtaacgtttttttttttttattattttttagggtattatatgagtagttttgttattatatcggtttgttattattttttggttttttatttgatgtagttagtttagggatagaatggggatttttcgttttagggtatataggaatttgattgttcggcggatgcgattagtgattaggtgggaagtttttgtcgttgaattagttagatttttttttagtgttagtatagttcgtttttttcgagtatttattatttttgtgaagagtatttgtggaagggttgatttgaggtggttacggtaatttatgttattagtatttatttttataattttttaggtttttttgtattttttttttatttttgttttttataaagttttatgtttttgttttttattttgggggttgttgatttttggttaagtttggttcgtcggaggttgcggtttggtattttgttgggttttttttttgtttggttttttttttttttgtttggttttggagttacgatattttgagattgagaaaaattttggtgggagttttagagttttgaagttattttttttagttttgtggttttaattttttttttattttttttttttttggtttttttgtagtatttttttttttttttttgataattattgttttttgggagattttttttttttggggttgtttttgatgtggtggtgaatttatggtagttaaagattttttgcggttttgagaggttttaggttggagtttcggggtgaatttagatttatttgttggttttattttttggatttgggaggtatgaattggtgttttaagaagttggggagaggtaggtttaggaatggttgtaagggatttagttgtttttattgttttttatttttggttttttgaggtttgggatttaggttttaagggtgtagagtaaggtttatggttaatgggagttgcgagggagttagggtttttagcggttttttgttttttgatgtaattgggttgagtaataggtttaggggaaataggttggtttgtggtgataggagattggaatttaggggtggtaggaatcggtatagtttttattgtggaagattttagtgttttgttttgattattttgagttatggttttaggggtgacggattggtttgtgggggtaaaaggtttaagattagaggttgttggtttaattggtttgggagttttgatagaggatttatttgttttttttttagtggttttagatgtgagtttgggggtgataggttggtttgtggaggtggtaggatggggtttaggggttgtggggataattggtttaggggttttgatagaggatttatttgttttgtatttagtggttcgagatgtgggtttaggggtgataagttggtttttggaggtggaaggttgaagtttaggggttatagggataattgatttaggggttttgatagaggatttatttgttttgtttttagtggttcgagatgtgggtttaggggtgataggttggtttgtggaggtgggaggttggagtttaggggttgcgggtataattgttttaggggttttgatagaggatcgattttttttttttttagtggttcgagatgtgggattagaggtgataggttggtttgtggaggcggaagtttgtagtttaggggttgtggggataattgttttaggagttttgatagaggatttatttgttttttttttagtagtttgagacgtaggtttaggggtaataggttggtttgtggaggtggaaggttggagtttaggggttgtggggataattgttttaggggtttttatagaggatttatttgttttgtttttggtggtttgagatgtgggtttaggagtgataggttggtttgtggaagtggaaggttcgagtttaggggttgtggggataagtgttttaggggttttgttagaggatttattttttttttttttagtagttcgagatgtgggtttaggggtgataggttgttttgtggaggtggaaggtgggagtttaggggttatagggatagttgatttagggttttttatagaggatatatttgttttgtttttagtggttcgagatgtgggtttaggggtgataggttggtttgtggaggtggaaatttggagtttaggggttgtggggataattgttttaggggttttgatagaggatatatttgttttgtttttagtggttcgagatgtgggtttgggggtgataggtcggtttgtggaggtggaaggtcggagtttaggggttgtgggtataattggtttaggggttttgatagaggatttattttttttttttttagtagtttgatatgtgggtttagaagtgataggttggtttgtggaggtggaaggttggagtttaggggttgtggggataattggtttaggggttttgatagaggatttattttttttttttttagtagtttgagaggtgggtttagaggtgataggtcggtcggtggaggtggaaggttggagtttaagggttgtgggtataattgttttaggggttttgatagaggatttattttttttttttttagtaatttgagatgtgggtttagaggtgataggttggtttgtggaggtggaaggttggagtttaggggttgtggggataattggtttaggggttttgatagaggatttatttgttttgtttttagtggtttgagatgtgggtttgggagtgattggttgggttgtggaggtggaagggtggggtttaggggtagtagaggtagttggaaagggtgttattttggaggattttcgagttttaattttaggttttgggtggaaaggttttagttttgaggataagggagtttttggagttttttgatttttattttgtttggttttacgaacggttggtttgatagaaggtaaaaggggagaaagaaggggcggaggtgtaagatgtttttggttttgagagttaaggggtttttggggtggggttggggttttaggtattgtaggaggtagataagtatttggagatttttgatcgttttagggagaaatagaagtaagtgagggggaggaggtggagaaaagagatagaatttggatattgtttttgatatttgtttatggttagataggtttattagatttttatcgggcgtggtggtttacggttataattttagtattttgggaggttgagacgggcggattacgaggttaggagtttaagattagtttggttaatatagtgaaatttcgtttttattaaaaatataaaaaaaaaggttaggtatggtggttgatgtttgtaattttagtattttgggaggtcgaggcgggtggattataaggttaggaaatcgagattattttggttaatacggtgaaatttcgtttttattaaaaaatataaaaaattagtcgggcgtggtggcgggcgtttgtagttttagttatttggaaggttgaggtaggagaatggcgtgaattcgggaggcggagtttgtagtgagtcgagatggcgttattgtattttagtttgggggatagagtaagattttgtttaaaaaaaaaaaaaaaaaaaaaaaaattagttaggtgtgttggtaggcgtttagtagttttagttatttgggaggttgagggaggagagtcgtttgaattcgggaggtagaggttgtagtgagttaagatcgcgttattgtattttagtttgggtgatagagtgagattgttttaaaaaaaataaaaaaatatataaaaattagtcgggtgatatgcgtttgtagttttagttatttgggaggttgcggtaggaaaattgtttgaatttaagagacggaggttatagtaagttgagattacgttattgtatattttagtttgggtgatagagatagattttgttttaaaaaagaataaaaataaaaaatatgtttattggatttttttttttgtttatgattttttttttattagattgggatttatttgggaagttattttttttttatagatttgtttttataatgttattatagtgttttttatacgtggatgatggtaaggaaaaggatggttggggtaaagaaagaagaaatacgaagggttttttttttgagttaggtaggagatataatttaggaaatagatatggaaaataacgggtgtcgaggataaaggaatagaagttaattaaggcgtgataaaaatggaagaaaattgaataatgagaaaggaatagattaaagtgaggttaggtgaaagagtattggagaagatatagagatgatttgtggaataggaggtagaaaaagtagtttttattttggaaatttttttagtagttttgattttggaagtttttttagtaggtggtattttgtaatttaggaggtttagatagaaagtaaatataaaggtggttgagttttaagtagttggttgtttaggggttgattattacgaggtttgtgtattattttgggtttttttttgtttttatttatttttttgatgttttttggggtttattggggatttttttttatttgattggtttttagaaggtacgggggttgaggtaggtttcggaaggtttttcgtttttattttaggttttggtgttgggttggaggtttgttttttttggttttggttttttttttttggtttttttttttgtgtatttttttttaggattattttgggtatttttttttttaattcggttggatcgtattttttgtttgttattggtttttttattttttttttaaatgttttgtttggaagggtttgtttttgtatttgttttttttgtatttttttagatgttttaatttttatttttaaattttttttattttttttaggatttgtattttttttatttttgttagatttttgtttttgggtgtttttagttaataattgtttttgttttttgttttgtttttttttggttaatttttttttttttgttatatttgtttgtttttttggtagtagttttttagtttttttttttaatggtttttttttagggtttattttttttgttgttttttttggtatatttatgattttatttatagtttgtttttttttgttttgaatttttattggttttgtgtgaattgggttttttggatgttggttttttggtattgttttaggtggagataggtaaggtttataggttttaaggtgcgtgttaaaaggttgggttttagagtttttagatttttttagatagaatggttgtgtagttaggattttttatggtttatttagggtatttggaaggggaggaaggaagagagagagagggagagggagagaaaagagggagaggaagagggaaagggaagtataggttgatataataaatatgatgagaaaggatttagataaatttatgaataataaatttgaataggttattaaaggtaagttgggaataagggtggtagttataatatttaacgtttgttttaaaaaggttatagttttaggcgggtatggtggtttagatatgtaattttaggattttgggaggttaagatatgaggattgtttgaggttaggagtttgagattagtttggataatatggtaaaattttatttttataaaaaatataaaaaaattaggtgtggggacggggatttgtagttttgtagttttagttattcgggaggttgaggtaggagaattatttgaattttaaaggttaagattgtagtgagttgtgattatattattgtattttagtttgagtgatagagattttgttttaaaaaaaaaaaaaaaaaaaaatttaagagaaaaagaaaaatattatagtttaatatgagttttttgaatagttttttattatattattgtattttagtttgagtgatagagattttgtttgaaaaaaagaaagaaagaaagaaagaaagaaaaatattatagtttaataagagagttttttgaatagttttttttttttaagatagttttattttgttatttaggttggagtgtagtggtatgatgttggtttattgtaattcgtaattgttgggtttaggagatttttttattttagttttttaagtagttgggattacggtatgtgttaaagtgttcggttaattttttgtatttgttgtagagatggggtttggttttgaatttttagatttaagtgatttatttatattggttttttaaagtgttgggattataggtgtgagttattatgtttggttggaatttttttttttttaaaggttgaatagtattttattgtgtatatatattatatttttttttttttttattgatatataataattgtatatatttatggggtatttgtgttattttgatttatgtatataatgtataatgataaaattaagataattgggatatttattattttaaatatttattatttttttgttttggaaatatattaaattttttttagttattttgaaatatataataaattattaattatagtaatattattgtggaattgaatattagaatttatttatttaatttgattggatttttgtatttattaattaatttttttatgtattttgtttttttattttttttagtttttggtaattattattttattttttatttttatgagatttatgtttttagtttttatatgagtgagtatataatatttgtttttttgtgttgatttattttatttaatataatgtttttagggtttatttatgttgttgtagatgataggattttatttttttttgttgttgaatattgttttattgtgtatatatatatatttttttttttttttagattgagttttgttttgttatttagtttggagtgtagtggtatgattttagtttattgtaatttttgcgttttaggtagtaatttttttattttagtttttcgagtagttaagattataggtgtatgttattatgtttagttaaattttgtattttgagttattgtatttagtttatatatatattttttttttttttattattagagatgaagttttattttgttgtttatgttggagtgtagtggtgtgattttggtttattgtaatttttgtttttggggtttaaatgagttttttgttttagtttttcgagtagttgggattataggtatttgttattatgtttagttaatttttgtatttttagtagagatagggttttattatgttggttaggttggttttaaatttttgattttatgtgatttatttatttcggttttttaaagtgttgggattataggtatgaggtattgtgttcggtttatatttttttttttttcgtttttttgagatagagttttatttttgttgtttaggttagagtgcgatggtataattttagtttattgtaatttttgttttttgggtttaagggatttttttgatttagttttttgagtagttgggattataggtatgtattattatattcggttaattttgtatttttagtagagacggggtttttttacgttggttaggttggttttaagttttcgattttaggtgatttgtttgttttggttttttaaagtgttgggattagaggtgtgagttattgtgttcgatttcggtttatattttttttatttatttatttgttgatggatatttagtttgattttatatttgtttattgtgaatagtgttgtaatagtgtgtgtgtgttttttttaagagatattgggggtgggggttgagggatgggttattgtttagattgggtttaattgatttttttattttggttttttatgtaattgggattataggtgtttattattatgttgggttaatttttttatttttgtggagattaggtttttttttgttgtttaggttagtttttaaatatttttaatttgtagttggttgaatttacggacgtaaattcgtatatatagagggtttattgtaattagagtatgaaagaaatatgtaggaaggtaaattaagaaagaacgtaggtcgggcgtagtggtttacgtttgtaattttagtattttgggaggtcgaggtaggcggattatttgaggtcgggagtttgtgattagtttggttaatatggtgaaattttgtttttattaaatatataaaaaattagttaggtatggttatggatagttgtaattttagttatttgggaagttgaaggaagagaaatcgtttgggaggcggaggttatagtgagtcgagattgtattattgtaatttagtttgagtgatagaggaaaaaaaagagaatgtagaattggggatatagaggagggaagagttttttatatttgttgtttggaagttgtaatgggaagggttaagtttttggggtggagttaatatgaaggtttgggtaggtttattttttatgttttggattgttgtataggaaaagatggtttaagtttattttttttatattattgtagggttttatttttggttttttattttatttatattagtttttattttttaaggattattagtttaattttttagtttttattggtataggatttaaataatatagaagtttttattttttaggttttgattttttagaaagtattgggtagtttgtaggtttagatttttagaatttggtcggggaggaatataagatagtttaaaataaaaattatatttgatattaaattttttaaataatttttatttttttttttttaattttagttgttagaattttggttgattttagaggttaaggaaggaaggttagtatttattattatagttgtttttagagtttttggttttatttatatgttgttttttttttttttttgtggggatttgggttttttttttttgtggttgggtggatttttttagagtgtttgtgtttattattagatttgtgaggtttttttttgagatagggaggttttgttttatttgtgttataggtggtttattttgggtttttattttatgagtttttttttgtttaagaatagttgtagtttattttgttttagtatttttttttgttggaagttggtttttttttatatttgtaattattgaggttgttagggcggtgtttttttttgtatttgttttatagtttttatgtagaggttaggttttttttagagatattataagtagttttgttggttttttaattgtttttatatttgtttgatttgttttttttatagatatttgatgtttttttatatgtataatggttgattttggcgggatttttttttttatttgtgtgttgatgtttattgtggtggaggtttggtttttttttaggtggattttaggtgagtttttatttgtttttatattgttattattgtttttaaaaggaggttggtttttttttgaatgtgttttaataagggttttaatttttgtgtgatttttgaggatagtttttttattttttattgggagtttttttttttttacgtttgtgttattgttttttttagtggtggtttggtttcgttgtagaaggattatacgttggggtatgtttttttttgtatttttgttttatatagtaggttggtttttttttagatgtgttaaagttagcgttgttgagatttttttttcgttatttgtatcgttgttgataattatggaagtttggtttttttttagagggatagtttgtggggttttgtttttttttatatttgtattattattagtttggtttttttgtagatgggttaggtttggtgttttagggttttttgtatttattttatggaagattttttttttttttataggaatgataattggggttgttgggatttttttttttttcgtattagtgtcgttgtcgatgaagttaaaaggttgagttttttttaaatggattttagttggttttttaggaggtttgttgttattatttatatttgtgttattgttttttttaggaggttggtttttttttagaattattttagttggaattattttattttttgtattttttttgatttttgtattattgttttttttttttattaaaggttgattttttttaagttggattttagttataattttagttttagattgttttgtttttatagtggtattttttttggtagttgaggaggttttttttgtggttggttgttgatttttttttatatttgtgttattgtttaaattgaaggtaaaaggcggtttaaggtcgtttaggatcggggaatgtttttttttattattgtgaagggaagaaaagagagtttatagaatttatttttttggaagggatattttaatttaattgtgagttttttgaggggagatataaggtagtatatttttttttttgtttttaatttgttttttatttggtatattagatgtgttttataaaaatttagttgagtgaatgaatatgtatggttttttagttttaatttttatgataattattttttttagagattgattttttagtttttggtttttttttattttgaagatttaggtgtttgattttttggtatttatttttttggaattattatagaggaagatgtggtttttgatttttttattatacgttttttagaaagaaaatttgttaagaatagaaaggaatgagttgataattgtatatttattatttttgtttttttattttttttgttaatatataaatttatttattttttttttcgagtttttagttaatagaagtttttggggttgagtttttttttgtattttgggtgttttttttattgttagagggtttcgggagataaagggtagagagatatttaggcgatggtattggtagagtaagttagtaaagagaattaatttttggttttttagacggtgatttattttagggtttaaaattttaggaggttttaggatttgagtattattaaggtttttatagtttcggaggataggtgttttgttttaggttaagattttaatttttgtatgttgtttggagatagatggaaagggtagggttatagagtagttaggtattcggtttattatatttttttcgaggtgtagtgggaaatttaagaattagagaggtagataagttttaagattagagttttggtttgttattaggaaaaagtgtttattaggtattttattatttatttaaggtttttatatgtattagaaaaataaaaggttttaggatatttaggtattgaaagagtatatgcgatattttatttatttataatggatgtttttttattgttataaaatatatataatataaaatgtattattttaataattttaagtgtatagtttagtggtattaagtgtatttatattgttgtgtaattattattattatttatttttagagtatataattggattttatttgattttttttttttttttgagatagggttttattttgttatttaggttagaatgtagtgttatgattatagattagtgtaattttgaatttttgggtttaagtgattatttggtttagttttttaagtaggtgggattgtagatgtgaaatgaattattatatttggttaatttttaaatttttcgtagagatagggttttgttatgttatttaggttggtttttaatttttagttttaagtgatttttttgttttggttttttaaagtacgggaattataggtgtgagttattgtatttagttttattttaattttttaatttttttttattaaagtaaaattatttttagtgagtttagggtagtagtttgtaattattaatttaatcggttttattttttttatttatgaaaaaaaaaaatttatattttattgaaatatatataagttttttgtaattttttaaatattttattataaaaataaaagatttatattaatatttgaatatttaatattttttgatttttttttggtttatgggtattattaaagatatgtagtcgttttattggttttacgttatattttaaggatttattggattgttttgttttttttttttttttaatattttagttaatagtttgggtgttttttatgatttgggaaggatatatattattaattatttttattattggtttatataaatagtattagagttattagattgaaaattagggggtaaattggattattatgaacgttgatgtttttttttttattaatttttttgttgttaattttttgaagtatttaaaatattttttttttttttgtgatggagtttcgttttgttttttaggttggtatgtagtggtaagattttgggtttacggtaatttttgtttttcgggttttaagtaatttttttattttagttttttaagtagttgagattataggtatttgttattatgtttggttaatttttgtatttttagaagagatggggttttgttatattggttagggtggattcgaatttttgattttgggtgattcgtttattttggttttttaaagtgttgggattataggcgtgagttattgcgtttcgttgttttttttttttttttagtttatgttttttatatttttattagattattttagtttgattagatgtaattgtaaaaaatgataataaaagatgatatatatagaagttttttatgtgttaagtattgttttaattattttatatcgattttgatttatttaatttttataagaattttgtaaagtagtattattattttttatttttttagataaagaaattgtaatatagttgggttaagatttttagatttttttgaaatatatataagtatatataaggttaagatttgttttaaattatttagatgttttttttttaaaattttgatggtttttcgtgtatatagaataaaatttaaattttttagcgagattttttatgatttgaattttatattttgtaacgtttatttttcgttcgtaaaagtttatggtttagttagatattttttttagttttcgaatatattgtttttgtttttttatatttttatgttttagtttaattttttggtttttttttatttagttttttggtttaatttttattattttttaagatttagtttaaatgttatttttttttttttttttttttttgagatggaatttcgttttgtcgtttaggttggattgtagtggtgttattttggtttattgtaatttttgtttttaggttttaagcgatttttttgttttagtttttcgagtagttgggattataggcgttcggtattacgtttggttaatttttgtatttttagtagagacggggttttattacggtttcgagtttttgattttaggtgattcgtttattttggttatttaaagtgttgggattatagtagtgagtaatcgcgttcggttttaaatgttatttttttagtaaatttttttttggcgtgttttttgttttttcgtgtttttggtgtattttgtttgttttatagtggttaatggatttgtgtttattttaagatttttcgttatattgtaattattattttttatttttgtttttatatttatttatttttaggattggattaggggaatcgtgttttttttttagggtttattatatttatttaatggttatggtatatttgtttgaagtatttggtatatatttgtgaattaaatatgaaatcgattttgttttcgggaaggtttattatcgagtttattgatgaaggaataaatgagatggaaagaaaatagtataaatggaatttatttgaaaatatgttattttagagggaaattgttgataggtagggaaagtaggatgttttatggataaagtgttaatttcgtttttatgataggttaatttagcgggtgtttattacgtttggttttaatttaaagagttattatttttggtttttattttagtgggtttttttgtggttcgacgtttttttgtgtttttatatttaaattcggagcggggcgttaggtaaggatgagtattatagttcgagaagcgaatttttaagttattttcgtttagtcgtatttaaggtacgtttttttcgttttttgggggaattaagatggttttcggggagtcgtgggttaggtttttagaatttatttattttaagttttcgcgcgcgttattagtaacggtcgcgattcgggtggagcgattgcgtgtgtcgaaaaagagtttatttgttgattggtttttgtcgttgttttttataatcgtagttagtcgagcggaggtatatttaaagtttcgtttttttagagtttaaataggtggtgttttttaggttgttgagattagttaatgagacggtaattgaaggtcgtcgtgcgttaatagaataatgtacgtcgattgggtagttttaagggataatttattatcgtttgttcgtttattatttatttttcgcgtagttttaaatcgcgattagagagtttggcgttagttgtcggtaacggatagaggggttgtgttatagacgttcgacgtgtttggtaaggttagagcgttttttttcggtttttttagatatggtgttcgttgatttatgagaaatgaaagtgggttgcgcgttgtagtcgtggttggaggttgtagtttggagaatagttcgtaggcgtggtagtttatttttgttgtattggaattttatttttttttgatttggtttgtagtagaagtaatatttttttttttgggaatacgtttttgacggatattttgaggttatttttttaaatttaagattttaaagatttgtagtcgaatagagaaaattggtttgttttttgttttaaaggttgtttttatttttcgaggggcgagggaaggattataaaattatttatttttattttttaattaattaatttatttattttttgagatggagttttgtttttgttgtttaggttggagtgtaatggcgcgatttcgatttatcgtaatttttgttttttaggtttaagcgatttttttgttttaattttttaagtagttgggattataggtatgcgttattacgtttagtttatttttgtatttttagtagagacgtggtttttttatgttggttaggttggtttcgaatttttgattttaggtgattcgttcgtttcggttttttaaagtggtgggattataggcgtaaattatcgtatgcggttatttatattttattttttgagacggattttcgtttttgttgtttaggttggagtgtaatggcgcgatttcgatttatcgtaattttcgttttttgggtttaagtaatttttttgttttagtttttcgagtagttgggattataggtatgcgttattacgttcggttaattttgtatttttagtagagacggggtttttttatgttggttagtttggttttaaatttcggattttaggtgattttttcgtttgggttttttaatgtgttgggattataggcgtaagttattgcgttcggtttattttattttataataagatatgaagaaaatggtaattataatatttgtataatttataaagttttttttgttggttattttaattttgtgtataatagttaaataagtagattttataaacgaggagttggagttttgtaaagttaaaggatttttttaggattttatagttaatatagagataaattgaaataagttatttgattgtgtattttgagttatttttatttttataaaatgattgtgtttatttttttaaaacgtaaagtattatattttaagtgggtagagagggtttatataagttgatgtttttttatttagaaggtaatttagaaatatattgatttgtttagcgcggtgtttacgtttgtaattttagtattttgggaggtaaaggcgggcgaattacgaggtgaggagatcgagattattttggttaatatagtgaaattttgtttttattaaaaatataaaaaaaaaaaaaagaaatatattgatttgtgtgatcgaatgtgaattaataatgacgttgatttgatattatatttttgagtggttattatattttattgattgtatgttttttattagattgtaatattttggaggatagggagttaatttttaattattttgtaattatagtttttaatttggtggatatatagtaattattaaataagtgaataataaatttatgggaagaagtagatggatttcgttttgaatttatttaattttttttttattaattatttttttttcgttttttaatattgggttttttgtagagttgtagtggcggttatttggttagtgaaattagcgaattgaaaaattattgattttattaatatgtttaaagaggtaggttgaaaaaattgaaaatttattaggtattttattttatagttttttgtttgataagaagattaaggtgtttttaaagtttgttttaaggtttagattttttatttacgtaggagatttttagttttataaattttcgatgtcggtttttttaaattattttattttttgaatatattttttagataatatcgttattttgaaaagtttttgttgtaattttgttttttttttaaaataatggttcgaaaatttttaaggaaatagtaagagggcgattttttttttgaagtatttgagggagtagaagtttattgaagtttatgttttgggttattaaaggttaggggaggtagagtacggtgttagatttttttttatttttcgttgaattaagtaatttttttttttttagaggtattgtagttgggagtttttagggcgtgttttttttattatttaatttttggaattttagattttttaatttttgtatttttaagaattgtttattttttgtataaaaattttaggtatagaggaaaggaattttgcgtaaggtcgttttttatttataaaataaaaattttatgaaaattaaatcggtatttatttattcgttattttattttgtagtatggataataataggggattataatttttaaagaggattgcgttcgtttattggtttagaggttaatggacgtttggtatatgatcggtatcgattaattagggttaggttcgatgaggttttgtttttttatcgcgcgcggggtcgattttttcgttttttagtttcggcgtacgcgcgtttcgtttagtttgtttttttttcgcgtttttttttttttttttttttttttagaatttttttgtcgtcgcgtttgtatttcgttgttttagtttttggggcgtattttaattttttagtttgcgatttgcggagaaaaaaaattatttatttttttgttttatatatattttgaggcgagtaaaaaaattaaattttaattatgagggaaatcgtgtatatttaggttggttagtgtggtaattagatcggtgttaaggtaagaattttatattttttttatttttttttataaggaaaaatttaggtaagttatgaaaaaatggttgtggggtatttgtattcgttatttttaattaagatttgttttttttaagtttgttatatttatatatataataattgtagttagtatttgtttttggaaagttgggaattattttttttggtaggtatattttggagaaattagtaaaagggtttttcgggtttgggggcgggaagatcgaggatttataagatgttatttaaaagggtttttaacggttcgagaatcgggtagggagagagatgcggaaacggtcgtagataaagcggggcgaggttttgtttatgtgtatttcgtttaatttttttgcggggtatttagggttaaatcggagcgggaaggggtgaggttatcgggcggttgtagagagttttagcgtaagggtggggggcgatgcgttagggtgggttgcgttgggcgttattttttataaaagattagggattttaacgcgttcgcgattttagagggtcggttttgtatttgtttttgggtggaaggagaataagaacgggattaattttatttgtttttatggtttttaagagagatttttttagggcgtgaatagatatgtcgagaaaatgggggtgtgtggttttttttaatgagttttttaggatttaatgggagagaaagaattttttaaattaaggggtagaaatgtagcgaaggaataaaaatttcgaggttaagggggattttttttttttgcgcgcggttatagtgtagcgggggaggggcgggaggaagtgcggttgttacgttgtagtagaagggcggggttttgcggggcggggtcggggcgtcgtgggcgcgcggggataatgcggcgttgttcgtcggtaggggcgcgttattttgggtttcgtttttcgcgcgcggaatttttgtttttggtttcgtttacgcgcgaagttttttgtcggcggttcgatttgcgcgtgcgtcgtagttacgtggagggcggggggggtggtcgattgcggcggtagttttttttttagatttttagttttttgtgcgtcgcgcggtggggcggtgtttagtttgggggaaggagagcggcgtttatcgaagtgtggtcgatttttattcgtttatcgagtatttgggattcgttgtatatatttagagtagggaaagttgtggttttttcgggggagcgagtgtttaggggaagggtgtggtaggtttacgggatgttatgttttagaataacggtttgagcgtttgtggaattaaaatgggagatgtggggtcgaggtgggcgaattgggatttttttaggttaggggttcgagattattttgggtaataaagcgagatttttttttatgttacgtttttataaaaaataaaagtaaaaaattagttgggcgtggtggcgcgcgtttgtggttttagttattcgagaggttgagatgggaggatcggttgagtttgggagttttacgttgtagttattcgtgattgtattattgtattgtaggttgggtaataggaagattttgttttaaaaattagaagaagttgggcgcggtggtttatttttgtaattttagtattttgggaggttaaggtgggcggattacgaggttaagagatttagattattttggttaatatggtgaaattcgtttttattaaaaatataaaaagtagttgggcgtgttggtgcgcgtttatagttttagttatttcgggggttgaggtaggagaatcgtttgaattcgggaagtagaggttgtagtgagtcgagatagcgttattgtattttagtttggtgatagagcgagatttcgttttaaaaaaaattaagaaaaagatgaaataaaatggtagttggggatatagttggttgggatttgatttgttgtggtttcgttgttttttttcggtagttttgggaggtgattagtgatgaatatggtatcgattttatcggtatttattacggggatagcgatttgtagttggatcgtatttttgtgtattataatgaagttataggtaagggtaggagttcgggtagtttaggtttttttttttgttttttatttatttgggatttttttttatttttgggtacgttttattttttttgggtgaatttgttattttgtttttttcgtgaattatcgtcggggttaaagacgtttgttgttatttggtggcgggatttggaatgataagtttttgatttttgttgttttttatttttagtatatttataaatttttttttttgttagattttatagtttttaattttattttttgtaggtggtaaatatgtttttcgtgttattttggtggatttagaatttgggattatggattttgttcgtttaggtttttttggttagatttttagattagataattttgtatttggtgagttatatagatgatattagtagatgatatattatcgtgtttaatttatttgggtgtaaggatatagtaaaagttaggagatgattgttgtattggagtgttaatatagaaatgtgttttgaaatttaacggagggtagaggtagtgtttattattgttggtaaattatggggtagtagggggagaatatattatagtgaaggagaaagaagatatattcgagggaattatttgaaaagttgaaagatggaaatattatgtattttttatattttgttaattgagttttttttttgattgtattttaggttagtttggggtaggtaataattgggttaaaggttattatatagagggcgtcgagttggttgattttgttttggatgtggtacggaaggaggtagagagttgtgattgtttgtagggtttttagttgatttatttattgggcgggggtataggttttggaatgggtattttttttattagtaagattcgagaagaatattttgatcgtattatgaatatttttagtgtggtgtttttatttaaagtgtttgatatcgtggtcgagttttataatgttatttttttcgtttattagttggtagagaatattgatgagatttattgtattgataacgaggttttttatgatatttgttttcgtattttgaagttgattatattaatttacggggatttgaattattttgttttagttattatgagtggtgttattatttgttttcgtttttttggttagtttaatgttgattttcgtaagttggtagttaatatggttttttttttacgtttttatttttttatgtttggttttgttttttttattagtcgtggaagttagtagtatcgagtttttatagtgtcggaatttatttagtaggttttcgatgttaagaatatgatggttgtttgtgattttcgttacggtcgatattttatcgtggttgttgtttttcgtggtcggatgtttatgaaggaggtcgatgagtagatgtttaacgtgtagaataagaatagtagttattttgtggaatggatttttaataatgttaagatagtcgtttgtgatattttatttcgtggttttaagatggtagttatttttattggtaatagtatagttatttaggagttttttaagcgtatttcggagtagtttattgttatgtttcgtcggaaggtttttttttattggtatataggcgagggtatggacgagatggagtttatcgaggttgagagtaatatgaacgatttcgtttttgagtattagtagtattaggatgttatcgtagaagaggaggaggatttcggtgaggaggtcgaagaggaggtttaaggtagagtttttattattttaggttttttagtttttttagtcgttttatttaattgtttttttttttttttttagaatttgtgtttgttgtttttattttgttttttgtttttttttttggggggggtttagaatagtgtttggtatatagtaggcgtttaataaatatttgtttgttgaatgttttttttttttttttattttgggaaatttaggtttttgttattttgggtgattttgtatttttttttggtgtttattttatttgtttagttaatatttttttttaaaaatttttaagaagttgggtttttagattttatttagaattaattaggtgttgaaaatatatgtagataatggttattattttaagtttaaagtagaaaatggtagaaggtagtgggtagaagttattatataaggaaggggatgggattttttattttaaaagttttggagagggaaatttaggttattaaagttattaaatttttaagtatgtttattttttattttagttttaagggaggtgttagtagtattatttttatttttaatttttttttaagttttattttggaggagtttgttttattttgttaagtggaatttttttttttttaattttattttttttatttagttttttttttttgattagagaaagggattaagggggttgggaggggggaaagagattagttttggtttttaagtttttagaaacgtttttttaatttttatttttttttatttttaaaaaagaatgaatatttttgattttggagtggtgtatattgttatattagtgtttgagttagtttttagaggagaggggaatttttttttattttttttgtaatattttattttttttttttgttgttgtttttttttttatatatttggttttgttttattttatatttgagatttttattttatgttgaatttgttgtttttttttatattgaaaagatgatatcgttttaagagttaaaaataaatgggaattgaaaaaagttgcgagatgtgtgtttatttagggaaatacggttggttgatggaggtatggggtttgagtttagttgtattgttttttttaaattgatatttaatattgagtttttgttttacggatttaattaattggatattgggaaaagagttgtattggatatgtatagattttttattattttttaaataataatagtataaattatttatataatatttgtattagattaggtattataagtaacgtagagatgatttgaagtatataggttatatgtaagtattatattttatatgagggatttgggtgtttgtcgatttggtattttagggaggtattggtaaggatattgattgttttatagatttttatattattgtttttggtatttaaattgttttgagtattagttagtttttattgtagtttttgatagtttattatagttttgatgttttgggtttaaataatttattttatttttttaagtagttgggattgtaggtataagttaggtgagttagtgtattaggtttattaatgagttttaattggggaaggtataggtttagatgtaggatttagggatggaaaatggaagttgagaagaatgataaattacgtgtaattggtttttagattagtatttatattttttgggaatttgtagaaataaatgtaagttttttattttatttagatgtattgaattataaatggttgaattggttttggttatttagtttaggatttttttgggttatgtgtatttatggttattttttgtgattttgtgggtttagttaatttatgatattaagataattagtgaagttttggtatggtggtttttatttgtaattttagtattttggggggtcgaggtaggaggatggtttgagtttaggagttttatattagtttgggtagtagtgaattatttaataaaaaaaaaagttgggtatggtggtgtatgtttgtagttttagttgttggggtagaggggggtggtggttgttgggggtaggggggtggggattggatgggaggattgtttgagtttgggaggtagaggttgtaatgagttttgattttatttttgtattttagtttgggtgatagagtaagattttgtttttttttttttttttttttgagatggagttttgttatgttgtttaggttggagtatattggcgcgattttggttcgttataatttttgtttttcgggtttaaggaattttgttttagttttttaagtagttgggattataggtatttattattacgtcgggttaatttttgtattttagtagagatggggttttattacgttggttaggattggttttaaatttttgattttaagtgatttattcgttttagttttttaaaaagttttgggattataagtatgagttatcgtgttcggtttaagtttaagattttgtttttaaaaaaaaaaaaggataattaggcgggattgttattttatggttttattttaaaataatttgtattatttattattttatatttttaagtttataatgtaagttttaaagttattttgaaaataataattttttttgttatgtttttaggaattttaggaattagtattatttttaatattttttttattttagtatgtttttttgattataatatattgttggggggaaaaattaattttaaaatttttgatagtatataagtaatttgttttttttttattttagaaagtttattgtatgtaagaaagtttattgtatgtaagggaagaagttatattttagtatttattttttttttaatagagttaggattttgttttgttatttaggttggaatgtagtggtgtgattatggtttattatagttttagatttttgagtttaagtgatttttttattttagttttttaagtagttaggattataggtaagagttattatatttgagtttagtatttattttttttttttttttttttgaaatagttttattttgttatttaggttagagtgtagtggtgcgattttggtttattgtaatttttgttttttaggtttaagtaatttttttgttttagttttttaagtagttgggattattatttggtatgttttattttgtttggttaatttttgtatttttggtagagataaggtttcgttatgttggttaggttggttttgaatttttgattttagatgatttgtttgttttggttttttaaagtgttgggattataggtatgagttattgtgtcgggttaagtattaatttttagttgtttttgttttattagtatttatttatagtaatttatttgggtagtaaagttgaaaatttttagtttattttttagttttggttaggaaaatattttagataataggtttaaatagtttgatttaattaggaagttaaataagttgaggtggggtggagtgggattattagaaggttgatatgggatcgttggagttggtaattatagtagtgtgaggttggtaaggggagtaattttttttaagataaggtataaattatttggtaaggagagatgaggggtgggattttattgttaatggatatgtttagggaggttagtgggttatatgtaataggaggattatttaggtaattttagttatgaggttgggtatttgtgagggttgaaggtttaggttgtttttaaaggtttgtgatttatttggtaaaaagataatagtagatgatatttgggaatattcgggaggttgaggtttttattttttcgggttttagtttagacgaatgggttataggtagaatatatacggttagggttttttttggtgttttattatttgtttttttaaataaagatattaggatttatatataataaattattgaagagaggagagggggtagagttttgtttgtatattttttttagttttgaatattttattgtaggtttttaggaggttttaaggaatttagtttgaaggttattggtatgatttagtgtttttatttatatacgttttttttttttttttttttttttgagacggaattttattttattatttaggttagaatgtagtggtgcgattttggtttattgtagttttcgttttttgagtttaagtgatttttttgttttagtttttcgagtagttgggattataggtatgcgttattatatttagttaatttttgtatttttggtagagatggggtattattatgttggttagggtgattttaaatttttgattttagttgatcgtttattttggttttttaaagttttgggattataagtgtgagttatagtatttagttcgaatatgtatttttttttttttttttttttgagatagagttttgttttgttgtttaggatggagtgtagtggtgttatttcggtttattgtaagttttgttttttaggtttatattatttttttgttttagtttttttagtagttgggattataggtatatatcgttacgttcggttgttttgtatttttagtagagacggggttttattgtgttagttaggatggttttaattttttgatttcgtgattcgttcgttttagttttttaaagtgttgggattataggtatgagttatcgcgtttggaatttttttttttttttgagatagagttttattttgttatttaggttggagtgtagtggtgtgattttagtttattgtaattttcggtttttgggttttagtaatttttttgttttagtttttcgagtagttgagattataggtatgtattattaagtttggttaatttttttttgtatttttagtaaagatggtgttttattatgttggttaggttggtttttaatttttaattttaggtgatttgtttgttttagttttttaaagtgttgggattataggcgtaagttattgtatttggttttatttttttaatatatatataatgtttattatatattaggtattattttaaatattgtaaatatttgttcgagttttttaataatttaatagggtagtttttaattattaatttaattttaagatgaggaaataggtatagagaggttgattatttgtttaagattatagttagtaggtattgtagttaggattcgtaataaaatagtggttttagagtttgtttgttgatttttattatgatttataggtgaattaattggggcgttgagaaaagtagtgatatgttttagaattaattaattgttaataggttgtaattagttttttatattagtggggtgattataagtataggttgtagagatagtcgatttggattttattttagttgtattagtagaatgagtaggaatatgttggatgttgagtttttggattttgtaaaattttatatattttaatggtagtttgatttaaaataatttatttatgtagaagtttagtattgtgtttggtatatagaaagtgattaataaatattaatgatttttaggtttggatgttggttaaatgttaggtatattgtgttatataatataggaatttagtaattttttttagttttaatttgagattttatttgggagatgtttacgtttgtgagtttttttatattttttggtaggcgagttagaatgtttagtatttttttagttattttggttgtttttatggttttattgtcgttggatattagtgtgattttattggttgaagttaagggattattgattttttttgttatttggtaggagagagatatttatttagtgtttatgatttgattatattttttataaaataatttattttgggttttaaggttttcgttttattgattatttttttttattttggttattaataatttttatttttaatttagagtttttttaggttgtttttttttaagttttttattatattttattttttagtttttggttttattttttttttttttggtgtttatatgatttttagatttggggtagtttttttagtagtatgtttagttgagtagttttttggtatagttggaaggtttttgtttttttggttatttgtttagtttcggttcgggttcgggtttttatggtaaaggttttagtttttttacgtatttgagggttaaggatgtttgtgagattgacggaaattattaagaataagaaattttcgattaagtagtaatttttattttttttataagttagtatggaattgttttttaatttattcgtatagacgcggtttttgttttcgtttgtataattagttgggatttgtggatagaagggaagtggagggtggagtttagtagtttttatttttaggagaaaggtttagtgttgtagaggtagacgtttttgaaatttgaaatttataggagtttaggtggtgaaggttttagtattttattttggggtgtttaggtggtaagtgagttaggtagggttagggaggggatatttatttttttgtttcggttaggcgttttagtttgtagcgtttcgttttcgttggttttcgtattcgggtttttagttttttttttcgtcgggcgattttttgtttttgtattgttatttgttgggttcgttttattatttgtatttgtattcgttgttttttaatttgttgtttagttttggttatttgggtaggagggtgaagttaggtttacgttttgagttagaggtgaagagtaagtgttcgggaattagagttttagagtgggatataaaaataggagtcggtggtcgggcgcggtggtttacgtttgtaattttagcgttttgggaggttaaggagggtggattgtttgagtttaggagttcgagattagtttggttaatatggtgaaattttgtttttattaaaatataaaaaattagttaggtgtggtggcgaatgtttgtagttttagttattcgggaggttgaggtaggagaattgtttgaatttgggaggcgaaggttgtagtgagttgggattacgttattgtattttattttgggtaatagagtaagattttatttttaaaaaaaaaaaaaaaaaaaaaggagtaggtgtatgaaggtgggtttttttttgtttgtttggttagtttagtggagtttagtgtttttttgatgagttttcgtttaatttattttttttacgtgtgtttttttttagagtataaatattttgagggtattgagtatatgttggttttttgttatttttagttttgtttaaatttttttattgttgttgcgataattttagtgttagtttaggttattgtaatagttgatttattttttgtgggggtggggataggtgattttttttgttttttgtatatggtgtagatttaatagaaaaaaaagtgaattacgaggttttttttttattttttaaattatttgggttttttttttagagaaattattaagattagttttttgtgtatttttttagggatattttgaatatttataagaatgtgtgtatttatagaattttttttatttaggtagatttttttttttttttttgaggtagtttcgttttattgtttaggttggagtgtagtggtacgattagtttagtgtaatttttattttttaggtttaagttaattttttgttttagttttttaagtagttgggattataggtatgtgttattatgtttggttaatttttgtattttttttagtagagacggggttttattatgttggttaggttggttttaaatttttgattttaagtgatttattcgttttagttttttaaagtgttgggattataggtatgagttatcgtatttagtttagattttatttttttattttttgtagtgtgagggaattagaaggtttttattaagatgttagtgaggagaggtgttaggtaaggaatatattttttttttttttttgagatattattttattttgttatttaggtttaatggcgtaattatggtttattgtagttttgatttgtttgggtttagatgattttttcgtttttttttttagagtagttgggattataggtgtgaattagtatattcggttattttttgtattttttgtagagatagggttttttatgttgtttaggttgattttaaatttttgggtttacgtgatttatttgtttcggttttttaaagtgttggggttataggtatgtgttattatatttagttagaatatatgttttcgttgttttattgtttaggtttagttatgtattattattattgtaggttttattaatatatgtgatgttttttttgttttttattttttttcgggtttatttgtttattttagagagaagtatagttttggagacggtattttgtattgttttttattttaaatttttaaattcgttttaaattggtttcgttgttttttatatcggtgtgtaggattattttttttttgtgttttttaggtaattatttgtttgttttttttttttttttgtttatgtttattttttggtgaaatttaatttttagaagtttttttagaaagaatataaagataatattttttttgaggttttgttttttttgagatttttattttatttttttttgagatggaatttcgtttttggtatttaggttggagtgtagtgacgtagttttggtttattgtaatttttattttttaggtttaagtaatttttttgttttagttttttatgtatttgggattataggtgtttgttattacgtttagttaatttttgtgtttttaatagagatggggttttattatattggttaggttggttttgaattttttattttaggtgatttatttgtttcggttttttaaagtgttgggattataggcgttagttattgtattcggtttttatttttttattttaatattagttaggttgaaagtaggttgttatgttgggattaattttttattagaattttgaaggtatttttttatggttttttagttttttaagaaatttgggtttgggttagttatggtggtttatgtttgttattttagtattttgggaggttgaggtgggtagattatttgaggttaggagtttatgattagtttggttaacgtggtgaaatttcgtttttattaaaaatataaaaattagttagtaatggtggtatatatttgtagttttagttatttgggaagttgaggtaggagaatcgtttgaatttaggaggtagaggttgtagtagttgagattacgttattgtattttagtttgggtgataagagtaaaaatttattttaaaaaaaaaaaaaaaaaaaagaaagttgggtttgatgtagtggtttatgtttataattttagtattttgggaggttaaggtgggaggataatttgaatttaggagtttaagattagtttgtgtaatatggtaagattttatttttagaaaaaaatttaaaaattagttgggcgtggtggtgtgtttttgtggttttaattattggggaggttgaggtgggagaattatttgagtttgggaggttgaggttatagtgagttttgtttatgttattgtattggataatagagtaagattttgtttttgaaaaaaaaaaaaaaaaaaaaaaaaaaggaatttgaagttattttgaagtttgtttttttgagatttttttttttttagaagtttttatattttttgtttttagtatttttaagttttatagtgttatgttttaatgtatatattttttatttattgtattgggtatttagtagattattttaatttaaaattttatttttatataattttttttagaatgtttttgtttttaataagttatgttatatttgtatgtgtttgatttttttttttttttttggagatggagtttcgttttgttatttaggttggagtgtagtggtatgattttattttattgtaatttttgttttttaggtttaagtgatttttttgttttagtttttcgagtagttgggattgtaggcgcgtattattacgtttggttaattttttgtatttttatagagttggggttttatcgtgttagttaggatggtttcgattttttgatttcgtgagttatttattttggttttttaaagtgttgggattataggtatgagttaatatttttggttttgtttgatttttattagttttttttttttatttttttgtttttttttgtggggttttattttttttttttgttagtttttgttaggttattaagtatattttgtttttggtttttttggttgtttttaaatttgtgatggtttgttttgttgtttaggttggaatgaaatggtacgattttagtttattgtaatttttgtttttcggatttaagtgatttttttgttttagttttttgagtagttgggattatagttattattttagttaatttttgtgtttttagtagagacggggttttattatgttggttaggttggttttaaatttttttgttatttgtttagagggaagaaggttttaatattgaaaggaagttttgagtatgtgggtgaggtttgttgattttgagttttattttacggtgatttggataggttatgtacggagaaatatttgatttaggattttaagttatttttttttggattggttatgttttttagagtagttttttgattttttttttggaagatggaagttttgggagttgagtggggttgagggggttggggttggggttggtttttagtatttagtatttatgaaagttatagttattttatgtttttgttattggtaaattatttaggtttttatttgtgttgggttagtttttattatattttttagtttattttttttagataatagatttttaatggtaggtatggtaatttatatttgtaattttagtatattgtgaggttgaggtggatggattatttgaggttagtagttcgagattagtttggtcgatatggtgaaatttttttttattaaaaaaaaaaaaaaaaatataaaaattatttgggcgtggtggtgggtatttgtaattttagttgaggattatttgggagggtgaggtacgagaattatttgaatttaggaggtagaggttgtagtgagtcgagattgcgttattgtatttgtattttagtttggataatagagtgagagattttgttttaaaaaaaatataaataaaatagataaataagataataaatttttagatgtttgttggagtagggtaggaattattatttagaggtagtgaggggttttgagaaggtgttttttatatgttttttttatttaattagtttattatagttggagaagtattgggtgttgttagtttttgagttttagattattttattgtttttttttttgtaggttttaagtttagttgtgttatatttgtttagttaattattattgatttttagtttttaaaatgatgttttggttttcgtttttattttttttattttttttttttttaaagtttagttagttgggtatggtggtttacgtttgtaattttagtattttgggaggttgaggcgggaaggattttttgagtttaggagtttgagattagtttgggtaatatggtgaaatttcgtttttataaaatatataaaaattagttaggcgtggtggtatatgtttgtagattaagttatttaggaagttgaggtgggagtattgtttgagtttaggtagttgaagttgtagtgagttgagattgtatcgttgtattttagtttgggggatcgagtaagattcggttttaaagaggagaggagagaagaaagaagagaagagaaggaaagaaaggaagaaagaaagattaattaagtgtaatagtgagaagtaggtaaagagtagaataaggagtttaatttgtaattgattgaataattaattgagataatttattatttttggataagtttttatttttattttaaaaaaaattattttagatcgcgttattgtattttagtttgggcgatagagcgagattttattttaaaaaaaaaaaaaattattttggttttagtgaggttttaggagagagtaaaattagttatatttgtttaatttattatttttgaaaaagagtttaatttattttttgtttttttttttgagatagagttttattttgttatttaggttggagtgtagtggcgcgatttcggtttattgtaagtttcgtttttcgggtttatgttatttttttgttttagtttttcgagtagttgggattataggtgtttgttattacgtttagttaattttttgtatttttagtagagacggggttttattatgttagttaggatggtttcgattttttgatttcgtgatttgtttatttcggttttttaaagtgttgggattataggtgtgaattatcgtattcggttttgttttttttttttgttcgttttttataaggtaattagattgatttttatataaatataaataagattatggtatttttttgtttgaagttttttaatagttttttattgtgtttttagtttttttttgtgtttttatcgtgattatataaattttttgtgatttggttttgtttgttttttttttttatttatagtatattagcgtttttagattagaaattttttttttgattttattttatagtttttgtatttattggttttttgtttagttataagttacgtatgattgattgattgattgattgtttgtcgttcgttcgttcgttcgttcgttcgttcgttcgttcgtttattcgtttattcgtttatttatttatttatatatttattttagaaggagtttcgttttgtcgtttaggttggagtgcggtggcgtaatttcggtttattgtgttttttggatttaagcgatttttacgttttagttttttaagtagttggaattgtaggtttaaattattatattcggttaatattttttgtatttttggtagagatagggttttattgttggttagattggttttaaattttcggttttaagtgatttttttgttttagttttttaaagtgttgggattataggtatgaattatcgcgtttagttattttttaagtatgattatttaaaaagtataggttagaatatttttggtttagaattgtatattgtttttttttatttttaagtttgattttaaatattatttttttatagaaattttttttattattcgttaatttaatatattaattttttttttatagttttttatattattttgtttattttttttatagtatttaaataagaattatagtttgggaaggttatttatttgtttattagttgttttttgtgttataatgtaagttgtataagggtaggaattttttttgttttatttttatatttatagttttatttttaaaatggtgtttagtatatagaaggtatttaatagatatttgttgaataaattttttttttttgaatatttagtatattgtttggtgtataacgagaaattgataaaagttgaaaagagtttaattagtttaattttttaatttgtagataagtaaggttatgtttagaaggttaagaattttatttatagttttattgtaagttagtagtttttattatggtaattttttttaaatttaaattttaatgtgtatataaattatttaggaatttattttgagattttgttaaaatgtaggttttgatttagttggttagggttagggtttgtaattttgtatttttaataagtttagtagtgatgttgtagttgttgttgggtagaatatagtttgagttgtaaagttgtatgttatgtttaatttgttaagttatttaggaatttaatataataataaaagatgtttttatttttattatgtttttagtttgtattaatttttggtaaaaataaaatgtataatattgttattttttgggtaaaggttttaaagtatagttgatttttattgtttttggtagttttgttttataaagtagttatgaatgttgaattagttaatatttaatttgtttttagaagaaatataggttaggttttcgtgagtttttggttaaaatatttttattaattgattaatatagagttttgttttatatgtgtttttgtttaaagatattttatgtaaaatatattgttgatttattaatattgaatttatagttaatagtagtataatttatgtatgaacgaagtttatttaatatatgtattttttttataaggtatattatagttcgtttgtattaaaggatattagatagtattatagtattgatgtttgggggttattttaaagagtgaatttattaataaaaagtataaaaatgtaaaaaatacggtagtaaatatattgtgaaaataatacggtttacggtatgagagttgaaataaggtagtagagtatttttttgattaattttatttgggtattgtgcgtgtttgtaaaagattttgaaagtgttgcgattttattggtaattttttgaggttattaatatattttagtgaataggtaaatttttagatacgaataatgaagaatgaagattaattatattttttggtaatattaagggttgtttatattttattttgtaggatttaatgtttaagtttatgttttttttttttatatttttttttaattaattagggttgtcgttagtttatagtatgtttttgtgtaaattagaaatttttttgtgtagatgtagatttatgttagaatgtattgtttgattagaggggtatgggtcggatttgagttcggatttatttttttagttagatgtttttgtacgggtatagtttgttttaaatatatgattagttttattgattatatttttttttggtttttttttttttttttttttttttttgagatggagttttattttgttatttaggttggagtgtaatggcgtggttttagtttattgtaatttttgtttttcgggtttaagtaatttttcggttttagttttttaagtagttgggattataggtgcgtgttattatatttggttaatttttgtatttttagtagaaatagggttttattatgttggttaggttagtttcgaatttttgattttgtgatttatttgttttggtttattaaagtgttgggattataggtatgagttatcgcgcgtggtttttttttttttttttttggataggattttattgttatttaggttggagtgtagtagtgtgatttcgatttattgtaatttgcgtattttggtttaagtaatttttttgttttatattttaagtagttgtgattataggttcgagttgttatgtttggttaatgtttgtatttttcgtatagatacggttttattatgttgtttaggttggttttgaatttttgaggttaagtaattagttcgttttggttttttaaagtgttgggattataggtatgagttattatattcggttggttttttttttaaagttttttagttgtaacgtttgagttttttaaatttttttttatatgggggagttggtttagagatggagagttagaataagattaaagttaaagtatgagaaatagtgtagtggtgttttgagatggatagtttgagaggaatggggaaggggtagagagtggtttggtagtggttttgatttgaagttgataggttaggttagtttgtgttcggcgggtgttgatttcgatgttataggcggttttttttagttcgtaatttttttgtgttttggttatttcgattttatttaggtattgagtagatatttttttttgtttggttttagttttttgtttaagtagagattaggtaggaaatgttagggtagggggagaaaggttacggtgatagtttgttttttattaaggttttttttttgttttatgtattttttttgtttatttagtatttttgtttttttttagttgtgttatttttatttttttttttattaagtaatttttattttttttattcggattttagtattttttttggtttttgtttttttaattcgtgtatttttttggatttgagttgttcgagttttttttaaagagtgtaaatagttttgtgggagagatgtagaaattagttttttggagggtttaagagatgggagtaaggaagtggggaaggattaattgtttagttttatttggttatcgtgaatgttttttagagtgtagttaattatattgatgtttatgttgattaggtttgaggaggttattttgaaaatttgttttgagaatttttgtttgtttttatagattttttgtgataataggatggtggggagaagggatgtaagttttttttttttttttttttttgtttattgtaatttttgttttttgggtttaagtgatttttttgttttagttttttaagtagttgggattatcgatatttattattatatttagttaatttttgtatttgtagtagagaaggggttttattaggttggttaggttggtttcgaatttttgattttaagtgatttgtttattttggtattttaaagtgttgggattataggtatgaattattttgttcggtcgggatgtatgtttttggatttattgttttttatagattagtgtgggttttgggttttttttattttgatatttttttagatggttttttgtttttaggttaatttttatagttatgtgggttatgatggttttttggtggttttttaacgtttttagggtaatgtgggtaattttagttttcgttttttttaggaatatttgataggcggtcgttaatatttttttgttttgtttttggatttttatttgtagttagagtaggggtaggaaaggtgtggtgggggttttatgaagttagagaaaaagtagagagagaagggagagttttttaagaaatgttttttttattttagggaaagaaaggaggaggaggtaagtgttttggggtgtttggaaaagatgagattagtagaggaatttttttgtaggtaagggttgagaagattgtggttagaagatgttttaatgtttgggagagagggtgatggggaagtggattgtggggaaaaggttttgaaagttttatttgggtaatgttagtgattgagatggggattttatggcgagtgtaaatttttttatttttgatattgagggttagtgtgttgagagagattttaggggaaaaagaagggatagatagtaagaagaggaggaaaaagagaaaacggaggttttttttttttggttttttttttgtttatttttggatttgttggatgtagggtaggataaagatacgttttttagttattatgattggggggtttcggtagaattttgtaaggtgtggggtagtgaggaacggtggtagagtttgaatgtggaagattgaggaattggcgggggtgaggggatagtaatttataggagagaatttgggagttggaggggaagtagtttgggttttggaatggtgggaattaaattgggtagttcgtggttattaaggggtagaagtttggtgttgggaagttggtagggagagggagaaggggtagaggttagatttataggggttttggggttattggttgggaagggaataatagtatttatcggagattattatggttttatttgggttataagtgaaaaatatggtttaggttggagttggaggagagggagggaaagtttttgcggatggggaaggcgcgttgtggcgtttataggggtttattttttttttttttcgttaggtttttttagtttgtattcgttacggttcgttttttttatatttatgggttcgttaaggtttttttttataaaatttttaagatttttagttatttttttttcgtttgcgtatggtttttttttttttttcgtcgttttttttgataaaggtttttcgcgtttagaggtttgtagattttttttttttttttttgtttttcggtagttttaggttttatttttttttttttatttatttttcgggacgcgggcggtagttcggttggggtttcgggaagggcggggtcgcgtagggatttgggagtcgggtaggggtcgttcgtagattagtttttttgggagttggtttcgttttcgcgttttttattttgtcgtatttcgttgttgcggtagacgcgatttcgtttttcgtaacggattaagtatttttatttcgtttcgtttcggtttagtgcgttcggttcgtttttttttcggtaggtttcgttagagttcgtagttcgttcgttcgttggttttcgggtttagtcgggttgtttggttagttcggggagggttatatttttgtcgttttagttatcgttttttttgagtcgggaatttcgtttacgtcgcgttacgtttcgttttcgggtgagggatttgattttcgtttggtattttggcgtaagggtgattgttatatttcggattcgtcgcggggtaattatttgggaaaatcgtagattgggtaatgaaagattatattcggtaatcggatgttgggttttgtgattttaggaaaaggggtttttgggtttagggaggtgcgcgggttggggattcggttacggcgtttttcgtcggtttttgttatttgaaggtcgggaggagtggggagtcggcgtttgtaaagatatatttaagattgtagatagtaaattaattttatttgtgtttatagaatatattaggcgatttcgatagtcgtttcgtgatagtttattaatttttaattttttatttcgtagttattttaaaggcgattttaagaagatggaaggattttacggattttatttttaatggttcgtcgaagttttatatagtagatagacggagttgagatgttggaggatgtagttattttttaaatttacgatttattattagattttattttagtcgggacgtttttttttattcgagttttttttatttttttttttattttgtcgtagttttaggtgttttgtttttattagttttataaagtttaataaatattaagagatttgtatttatagtagggggaatattttatatttttgtataagttaaaataaatattacgtatatatttttattatttaggaggacgtatataaatatatataaatattaattaggagtaataagaaataaattaacgacgtttttttttttatcgggtttagttttagttgggttgtgtttcggtttttatgcgtttcggtttttgtgcgtttcggtttcgttttaagtatcgggtggcgttttcgttgtagtgttttgagtttaagttgtttcggaagttttagttggggatacgttttcgcgtattaggtacgtttggtgtttttttgtggtttttcggattttttttggggagtgcggggagttatagttagaaggcggtcgggtgttgttggaggaaagtgttgaggtttagagcgtagttcgagggtttcgaagttagattaaagggttcgaggacgggggatataggggtgggcgttagggatgcggcgttaggggcgttttttggaggtaggggcgtcggtatattttttttagttattaggatttggtagaagacgatggtgagtagtagaaagagaagttttttggttgggttcggtttttcgattggtagttggcgtcggatttaaggggagataaaataggagataggttaggtcgaggtttttggagtcgggtcgttttttagtgattttagggtagcgtatttcgcgaatgtttatttcggcgatatttattattcgagggtagagaattttgcggttgcgttttcggtgttcgcgagaggcgttggggcgttcggtaggggtcgttgcgggtttcgggagagggtcgaaggtgaagattttaggatcggagtttcgtcggggtttcgggatggtggagggggtcggggtcggggtttgtaggatggttatggtcgggtggtagttgcgagagtgatatatggtgagtcgagcggagtgtaaggttaagtgagggtcggttgtcggtagaggtaatttatgtgtttttgaaaattgggcgggtttttttaattttttttttcgtagttggggagcggttggtagtagcgggttggaaatttcgacgattaaataaagggagtgggtggagatttgatatgtataattttaggcgtttaattgtacgttgtgagtgtgtgagtcgtgagtgggggtgggtgagatttcgggttgtaggtatatgtcgaggtatgtggtatttggagaggggtttattttagttataggattttttataggtttttttttttttttttttttggagatggagtagtttcgttcggtcgttaggttggaatgtagaggcgcgatttcggtttattgtaatttttgattttttggtttaagcgatttttttgttttagttttttgagtagttgggaatataggtacgcgttattacgtttagttaatttttgtatttttagtagagacggggttttattttgttggttagggtggtttcgattttttgatttcgtgatttgtttcgtttttttcgttttttttttagtagttttaagttgttattgttgttatttttacgtttacgagtttttaatgtttggtttttatttataagtgagaatgtatggtatttggtttgttcgtttcggttttttaaagtgttgggattataggcgtgagttatcgtgttttgttaagagggttttttattggagattaggttattttgttgtaatattgatttagttatatgtacgtatttatgtatttgtaggtatttttagaatataaattttttaagaaggaaattgttatagaaatagttaagattaagggagaaatgaatatattagtatatatagatataaatttgtttgtttgagtatatatgaagatatatatcgcgtagttatataaaagaataaaattatgtgttttgtagtaatatggatgcggttggtggttattattttaagcggattaatttaggaatagaaaattaaatattatatatttttatttataagtgggaattaaatattgggaatttatggatataaagatggtaataatagtaatttgagattagtagaagaaggacggagggagtaaggtaaaggttgaaatattaattattgggtattatgtttagtatttgggtgataggattatttatattttaaattttagtattatgtagtatatttaggtaataaatttgtatatatattttagaatttaaaataaaagttggggagggagggaaggatagaaagattaaaaaagtaatatataatggtggggtatggtggtttttgtttgtaattttagtattttggggggttaaggtgggaggattatttgagtttaggagtttgggtaatatagtgagattttgttattataaaataataataataataataataatatataattaaatattatttagttataaaaagaatgtaattttggaaaaaaaggaaaatatattacgtatatttattaatatatatgtatatagtaaaggtgtaaagattgtatagggatagtttagtaaaattatttttttaggagcgtgtagaaatatttatataaaggttggtgtagagggttataaatataaaggtaataggttagtagttatttagatttgttttttgttgtaagttaaataattaaatttatgggataaatattttaaattgtgagatattatataaatgttatagtaatggtaattatttaatttaaagtagatttatatttttataatttttttatagatagttgtttatggatatagaatttaattttttttttttgttttgagataggatttggttttgtcgtttaggttgaagtgtagtggtatgatttcggttgattgtaatttttgttttttggtttaagttatatttttattttagttttttgagtagttgggattataggtgagtattattatgtttggttaatatatatatatatatatatatatatatatatatatatatatatataaaattttttgtagagttagggttttgttatgttgtttaggttggttttgaatttttgagtttaattaatttgtttgtttcggttttttaaagtgttggtagttatcgcgtagaatttaatattttttgagtatttatttgttttaggcgttttttgttgagggtattattgttgagagttttgaggttagttttagtataagtgttgtgttatgtagttgtttgaggaaagttagataaagttgatattttagttatgagggttttatttttcggtatgaggagggaattatggttaggagagttttttatttgtttgtttttgttgttttttttttttttttttttttgttatattgagtttttgtttgaaggaaaggtaagtttttttgaagattttaagaaaggttaggtacggtggtttatatttgtaattttaatattttggtaggtcgaggcgggtggattatttgaggttaggagttcgagattagtttggttaatatggtgaaattttgtttttattaaaaatataaaaattagttaagtatggtggcgtatgtttgtaattttagttattcgggaggttgaggtaggagaatcgtttgaatttaggaggtagaggttgtagtaagttgagagcgtgttattgtattttagtttgggtgatagagtgagattttgttttaaaaaaataagaataaaataaaaaataaaaataaaaataaaaaaatttaagaaaattgaagattaagtgttaagggggggatttaaaagagttagtgtttatatttgtttaattaattaggggaggttttatggaagagtggtattgaaggtgattttgaatagtgggtgggatatgataaatttagatgtggaggatgattgtaagaatggaattagtaaagattttgagttggaaaagtataggatgtgtttggggaattataagaaaaataattttagagtaagttttttgtaacggagtagtgggaagtaataatggttggaaaggagtggaattgggtagagtggggagagtagagttgttaggttaggagtttgggttttattttagattgtagagtttgtgggttgttggatgagataaagggaggaaaatttaagtaggaaattgattgggatgaggagtgatgttttggacgggtagagattaaggtagtagataggaggttattggaggggtttaggtagatgataataagagtttgagaaggtggttttaagagatatttttagtataagataattagaattgggtaatgagatggatattattaggggaagggagtatgggagagggagagttgtcgatagtaagaggatgaaaagatttgagatgattttagagatttgaaatatatttggtttagatttttttattattattttaagtttggtgtataaagtgaatatatatatgattttttttattggaggttgtgttatatatatttttgtgttttttagagaatttagtatggtattttgtaggtagtagttgtttaataattttgttaaatgttaggtgaaatgtataattgtaagtgtgtatgtagtatttttattttggttgggttatattaagtttttgagatgtggttatatttttttaaattatttatataaatgtataatatttttagaaaagttgggataatttttatatagatattaaataggaaatatttttttttttttttatttaggaaatatttaaaaggattttttaattaagaatatgtaggaatataaataagaggataggttataatcggttagaaatatattattgttttgtgtataatttttgggtttataagttattttattttatatttattatttttatttaaatatataagattttttttatattatatatttttttttggttggtataaaatatattttttttgtaaataaaggcgtattgtttttttacgtttgtttttatatttgttattatttttatatttatatttaagtatagggagtttattatttttaatatttttattttaaggtaattcgtacgttatataatgattaatataaatttatgattatttatatatgtggatagatttttatatttatataaatataaattgggagtagggggagatagtgatgatggaagaaaattagtgggtgggagagagagagaagtattaaaggttaggaatgtattatttgtttatgatggaaaatttttttagggtattaggtagaggaggggaaatgaaggggatgttaggattttgttttgttattattttttatatttggaatttgggtttttagttgggtttagttattttcgttgttttttcggtatagagagatttttttttgtggtaagattagaatgggataaagagaagatttgagaattcggattgtttattatttttaattaattttatttttatttttgttatttttagagttttagggttttgtttttgtttttttttgttatataggaagttagggaaatgttgggggtgaattattaagttaataagggggtgggggagtgtaggttggggaatgagttaaggttagaaagtgttaggggttgagacgagtaattggattggtttttattgttttgatattggagaaataggtttttagttttttttatttttagtttttttttttattttttttttatttttttttagattattatgtttttttatttttttcgtttgatttttgttttgatttattattattgttagttttttttttagttttttgtttttttttatgatatatattacgttggggaattattttatgtatttgttttttgttgttgtttgtttcgtttattggaatataatttttacgagtgtatagggttatatttgattttttttttattagatttttgtagtatttttagtatttggttgttatttagtaggaatttaataaatatttttaaatttgtttttttcgaggagttaaattttatttgtagagaggtttgtttatttagttatgtttttttagaggtttttatgtttgttttttaaagaggaggttgggggtatttaggtgtggtttaggtgattcgtcgttgaattaggaataattgtgtagtgacgatagcgatagtaaagttttggttcgcgttttttataatttttgatataggagtgagttaggtttgttgttttatttgggtattgttgtattgttgattataggtttagaacgggggacggtaagaatgggtattggcggaggtagaatgggtaggggaaagggaggtagagatttggaaatgggagtatttgagaaaggaaagtagggtgaagggattgtattagggttttgggggtagggaatgataaagagaaagttttttagttgtatttggtatttagtagatttttaataattatttggtgatttgagatgggtttgagatagaaaggaaatacggaatagtaaaaagaatatattgtaatttagtggtgttagacgaaattgggtttaagtgttagttttgttatttattaattaggtaatattgggttagttatttaatgttgttgaaaatttgtttttttaattgataaatgggtaaattgatttttaggtaattgtaaaggttaagtatataaatttattttttttgggtatatagtaggtgttttttgtatggagtaggggtattattataattatgagaagagggattgttttggaatagggatgggtagtagtgagttaatttaggagtagggaattggaatgagaaagtaatttttaattgttaatattattaggagatataagttttttttttttttattttgttttttttttttttttatattaggtaggttttgtggttttttattttttagagaagtaaagatttttgtatttttagtttttgtttaattaatgtgagtgattttatttttttatgtatgtatttatttattttttgagataagattttatttttttatttaggttggagtgtagtggtataaatatggtttattgtaattttaattttttgggtttaagtgatttttttattttagttttttgagtagttgggattttaggaacgtgttattatgtttagttaatttttatttattttggtagagatagggttttgttatgttgtttaggtaggttttaaaattttgggtttaagcgattttttcgttttaattttttaaagtgttgggattataggcgtgagtataaagtttggtttttatttatttaaaaaatttagtttggttgggcgtggtggtttacgtttataattttagtattttgggaggttgaggtgggtggattacgaggttaggagttcgagattagtttggttaatatggtaaaatttcgtttttattaaaaatataaaaattagttgggcgtggtggcgtgtgtttgtaattttagttattcgggaggttgaagtaggagaattgtttgaattagggaggtagaggttgtagtgagttgagattgtattattgtattttagtttgggcgacgagagtgaaatttcgttttaaaaaaaaagaaagttttattttgtcgtttaggttggagtgtagtggtataatttcggtttattgtaatttttgtttttcgggtttaggcgatttttttgttttagtttttcgagtagcgtatgttattatgttcggttaatttttgtatttttggtagagataaggttttattatgttggttaggttggtttggaaaatttttgattttacgtgattcgttttttcggttttttaaagtgttgggattacgggcgtgagtattatatttagtaaaaaaaaaaatttgtttttatttattattatattgataaggaataggtgattttaaatatttttttttatttatattttagttggaataattttttagaggtatgggggtagagtggggtggtgagttttaggtagtaagttaataaatgatttttaaagatatttatttaggttttaggaggtttaaaattaggttttggtagtttttttgacgtaaaattatggtaagagtttcgggagtattaaggtaaggttataaaagtggtacgatgattttattttgggatgtagtttagtttgatttagtttaatttaatttagttattttggaggttgttatgagttgagtcgggagttgggaaagggtttagtatttttgtttttttgttaaagtcggttttttaggattttagtgttgtggttttttttttggttttggttttttttttattagattataattttattagagtaggattttatttattttgtgtattgttttatttttagtgtttagaattgtgtttgttaattaatataggttgttgaaaaggttagaaatataggatcgttgatgttattattgttatagtgttgttttcgtgggaagtagtttgtatttttttgtagatagttttaatgttagttattggagaatttgatggagattgaagttaaaatataattataggggaaaaatgtataataaataaaatatttttttttttgtttagattttttagatatttcgtatttattggatgagttgatttataaagtgaaaggtataaattaaaggttttttaatgtttttttttttttgaaattttatgatttagtagcgttttttatgtgtgtttaaaagttggacgtgtttttagtttattttttaaagtagttgttataggttttttttttttaaggttgggagggatagtttattttttaagaggtttttttaggggcggaggcgggtgttggggttggtttgtttgtagttttttggttttatttagtggggatcgcgtgttagtattggggtttggtgggttgttaaggggtgagttttgaggcggttttttgggaaggatagatgttatgtgtgatttagaattaagttagggaaaaaataagtttatttaatttttagtattttttgtttggtttggttttgtttatgagtttataaaagaggaagttgggtcggttagatagtagttttgtttttttttatgttttttttttacgttttacggattttttagagtgtttgggttttaggttatcgttattttagtttttgggttttggtttttttatgatattttttttttttagatatttggttatttttttttttaggttgggaattttatttattatagaaggggaattgtatataaggggaggttgtaaatttttgtgttttttggttttgttgaggtttttattgttagttatgattatttgggtttgtgcgtgtgattgttgtgtttttgatatagattaagtggtgttgattttgggagtttgaattaatagattttttgagagttgagattttttggtttaggaaagaaaaagggggtattaaatgattgggtagtcgagttatttttagggttgtaatattttagttgggattaatttatttagtatttttggtatttagaatagtttattattaaaaaggtatattttattttagtgaaaatgggataattatgggttataaagaatttttttaattattgttttttcggtttattttttatattttttagggtttttttgtttaaagatagatttgattatgtttatgtttgttttagtaagtttagtggttttaaattttttgagtttttaatttaaatttaggtattttgtaggtttttttttttaatatttttattgttttttgatgttgtgtatttttaattttgtttttttttttatatatgttaaatttttatttattggattttataatcgttttattttttttttttttttttttttatttttttgggaaaaaattatttttgaatttgttatttagaattagtttatttatattgtatataaattttttaaagtattatatatacgatattatagttatttgtttatttttttgattgttaggagaggtacgtgttattgagatgtagtcgttttaatattggtaattttttgataaggtttaaaattattattaaattgttattattaaaaaaaaaattagtggttaggtacggtgttttatttttgtaattttagtattttgggaggtcgaggtgggtaaattatttgaggttaggagttcgagattagtttggttaatatggtgaaatttcgtttttattaaaaatataaaaattagtttggcgtggtggtaggcgtttgtaattttagttatttggaaggttaaggtaggagaatcgtttgaattcgggaggtagaggttgtagtgagtcgagattacgttatcgtattttagtttgggggataagagtaagattttttaaaaaaaaaaaaaattagtaagaaatgtataaattagatatttttaatttatttttgtgggttgaatttattttatttttgattttgagttttttatataaaatttggtagtatttggtgatattgtattttgttttaaaaagttaggtagattgaagtataatttaaatatagtaaaatttattttttttaggagtagtttttgatgagttttgataaatgtatatagtttgtgtaaaggtttttattatgatgatatagagttttttattatttttaaaagttttttgtatttttttgtagttagttttgtttttattttttatagtaattattgattagatttttaattttatagttttgtttgttttagaatgttatatagatgaaattataggttgggtaaggtggtttatgtttgtaattttagtattttgggaggtcgaggcgggaggattatttgaggttaggagtttaagattagtttgattaatatggtgaaatttcgtttttattaaaaattagttaggtgtggtggcgggtggttataattttagttatttgggaggttgaggtaggagaattatttgattttaggaggtagaggttgtagtgagttgagattacgttattttattttagtttgggtaataagagtaaaatttcgttttaaaaaaaaaaagaaagaaagaaagaacgaaattatagtagatatttttttgtgtttagatttttttgtttagtataatatttttgtgatttatttatgttatggtatgatttagtagttttttttttttgatttttgtatagtattttattgtataaatatatgatagttggtttattaatttattattgatggatattgtggttttttttttatttttggaaatgatgaataaagttattatgaatatttatagataatttttttttaagatatgtatttttattttttttgagtagatgtttaggagtagtataattaggtgtatgtttagtttagtaagaaatcgttgttgtgtttagtggtttatatttgtgattttagtatttgtattacgacgtttagttaatttttgtatttttagtagagataggttttattatgttgattaggttggttttaaatttttgattttaagtgattagtttattttggttttttaaagtgttgggattataggtgtgtgttattatgtttagtttaaaggtagaaggattttttgagtttaggagtttgagattagtttgggtagtatggagagatttcgtttttataaaattaaaaaattagttaggtgttgtggtgcgcgtttgtggttttagttattttgggaggtttaggtcgaaggattatttgaatttaggggtcgaggttgtggtaagttatatttatattattgtattttagtttgggagatagagcgagattttattttaaaaaaagaaaaaataagggttgggttcggtggtttatgtttgtaattttagtattttgggaagttgaggcgggtagtttatgaggttagaagatcgagattagtttggttaatatggtgaaatttcgtttttattaaaaatttaaaaattagttgagcgtggtggtgcgtgtttgtaattttagttatttaggaggttgagttaggagaatcgtttgaattagggagtcggagattgtatagtgagttaagattgtattattgtattttagtttggcgagatttcgttttaaaaaaaaaaaaaagaaaaaaaagaatttgttatgttattttttaaagtggtttatattgatagaattgttttaaggaagttgtattaaaatgttttttttgtaaatttttgtttaaaatatgttaaaattaagtgttttttttgttatagaataggttgttatttagattattttaagggatagagatgggttggaatagagttattttagtggttagtaatttgttttttgaagaattagtatgttttttagaagttatagtggtttttagtgtttagcggtagttttaggagtatattttgtttttttgtttagattttttgtggtttagtatttttgtttgtagtgattggttttgtttaggttttgtggggtagtgtgaagtgatattagtttatatatttgagtatgtatgatgttttagaggtattgtgtgttttttttttgtttgtttgtttgtttgagatggagttttgttttgtttgtagtttaggttggagtgtagtggcgcgattttggtttattgtaagttttaattttcgggtttatgttatttttttttttagtttttcgagtagttgggattataggcgtttattattatttttggttaatttttcgtatttttagtagagatggggttttttcgtgttagttaagatggtttcgattttttgatttcgtgatttgtttatttcggttttttaaagtgttaggattataggcgtgagttattacgttcggtataggtattgttttaagagttatatttaaattaatttattaagtttttataattttaattgttattttatttatatatttattttatagatgagaaaaatgaggtttaatgaggtaatttatttttttaaggttgtgtaattaagaagtaatgggagttagatgtgaatttaggtttattttattttaaagtttagtggtatatttatttgttagagtatagatgttagagtttatttatttgggtttaattttatgtttgtttgtttgttttttgtttttgattttgagatggagttttattatgttgtttaggttggagtgtaatggtatggttttggtttattgtaatttttgttttttaggtttaagtaatttttttgttttagttttttgattagttgggattataggtatgtgttattatatttggttaatttttgtttttttagtatagatggggttttattatgttggttagattggttttgaatttttgatttcgtgatttgtttgtttcggttttttaaagtgttgggattataggtatgagttattatgtttggtttgtttgtttttagagttaagattttttattatagtttaggttgtagtgtagtggcgttattatagtttattatagttttaaatttttgggtttaagtaattttgttattttagttttttgagtttttaggattataggcgtgtgttattatgtttaattaattaaaaaaaatttttttttttttttggtagagatagggttttattttgttgtttaggttggttttaaatttttggttttaaatgatttttttgttttagttttttaaaatggtgggattataggtatgaaatattatgtttggataattgtatgttttaatttatttaatttttatggtatatttttgagaggagggtatgataatatttattatataggtgtagtgatagtatagaattttgtgaagtaggggaatgatagagttgagtttggtatttaggaagtttgtttttagagataaagttattgattttaatatttttttgttttttaataatttttattattaatgttattatttaatttattgatttagttttttttgtttttggggttttatattgttttgatgtttatgtttttgtttatgttttaaattgagattttgaatgggttgtgtatatattttttaggatatagtaatttttttgggtatttttatttttggttgtattattggttttttgttagtttttgagaattgtttttagtttaagtaaggattttaatttagtagatgaggttagggtcggaagattatttgtagggtgatttatgtttaaggatttatttttaaatattttttttaagagaaggtggtgtaattagaagatattttaaggttttgaggttatttttaaagattatttgtttttttaaatagattttgggtttttttaggtgagagattaattattgaatttattgttagtatttagtagtgtgtttgattgatatatattaggtatttaatggttttgattgaatgatgaataaataaatgaataaataaagaagtttagatttttttaatttaggtttatgttgtttaatatagtagtatgtggttatttattttattttattttttgagatggagttttattttgtcgtttaggttggaatgtagtggtatgattttggtttattgtaatttttgttttttaggtttaagtagtttttttgttttagttttttaggttgttgggattataggtttgtgttattatgtttagttaatttttgtatttttattatttatttatttatttattttgagttaaagttttattttgttatttaggttggagtgtagtggcgtgattttagtttattgtaggttttgtttttcgggtttatattatttttttgttttagttttttgagtagttgggattataggttttcgttattatatttagttaattttttgtatttttagtagagacggggtttttttttgttagttaggatggtttcgattttttgatttcgtgattcgttcgttttggttttttaaagtgttgggattataggcgtgagttatcgcgtttagtatttttgtatttttaatggagacggggttttattatgttggtcgggttggtttcgaatttttgatattaggttatttgtttattttggttttttaaagtgttaggattataggcgtgagttattgcgtttagttgtatgtggttatttgaatgtaaattttaatgagttaaaatttaaaatttagttttttagttttattagttatattttaagagtacgataattttatgtggttagtgattattatatttgaaaatacggaaatagaatatttttattattatagaaagatttgttggatagtattaggttagatgatagatagggtgggggaagagaaaatgttgtattgggaaaatgtttggtataggttgatggttttaatttgtttttgatatttttaaaagagttaagattatttgttttttattagattgtatcgtatattgtttatttagaggtttagaaattattttttttttagaaattttgtattgagaaatggaagtttatttttgattatatatatgatttatgtttttttagaaaggaaggtatgaagttgaagggggaattaagattgttgagtttttttgttttcggttataggaaattaattgatttatggtattttgtatttatgagtttatttagtttttttagggtataggaaagtggtgaaaataagtggttatggtttatagattttttagttggtagaggttagtttttatatttaaaatattagtagattgttaaatgtgttttaattaagagtagtggaaggtagaaaggtgtataaaatatgggttttaagaggtttataattaagttaagggaaattaagagattagtatataaatataagtatataaaattgtaattgtatttgtagttatatgtgtgtgtgtatttatttattatttatttatttatttatttaataatataattaattaatatttatttgatattttagagtttaataagtatttttttttatatgaagatttagtagatttttatgatgaatgttaaataaatggaatgttggtatagagagtaagtattttaggtattcgtagtcgggtgagattattgtggatggagtgatgggggaaagtttttgttgaggtagaattagtaggaatgtggggtagttatataaatatagatataatttttggtttttttattagatattttttaggtttttaattgtttgtagtttttgtttgttttttttttttaagatatggttttattttgtggtttaggttggagtgtagtgttatggtgtaattatggttcggtgtagtggtattattatggtttagtgtagtggtgcgattatgttttagtgtagtggtgcgattatggtttagtgtagtggtgcgattatggtttagtgtagtggtgcgattatggtttagtgtagtggtgtaattatgttttagtgtagttgtgcgattatgttttagtgtagtggtgcgattatggtttagtgtagtggtgtgattatggtttagtgtagtggtgtgattatggtttagtgtagtcgtgtgattatggtttagtgtagtggtgtagttatggtttagtgtagttttaattgttagagtttaagtagttttttttttttagttttttgatttgttgggattatgggtgtgtgttattatatttggttaattttttgattatttgtagatatagggtttcgttatgttgtttaggtcggttttaaatttttgggtttaagtaatttttttcggttttttaaagtgttgggattataggcgggagttattgcgttgggtttattgttagtagtttattttattttttaaaagataaaatgttgatgaagagtttttagtgatttatgttttttttttagttttttattaaaataacgtattttaaaaaaataaatttttatatattttatagtgattttataaatgtagaataatttggatatttttaatataaaatggtttgagttatttttatttaataattttgtgatgagtatataatgatatacgttaaataatttataatttaggtttatataatatcggttttgttttaaatttttgtcgtgtagaatatataaaaatttaattttgtagtttgattagttttgtttaggttttttttatataattataattatttttttgttaggagtaattttaaaatgtttttttaaagttttgtgtatttcgttttggttttttttaattttttttttttttttttttttttgagagggagtttcgtttttgttgtttaggttggagtgtaatggtttgatttcggtttatcgtaattttcgttttttaggtttaagcgatttttttgttttagttttttaagtagttgggattatagtgtgtgttattatgttcggttaattttgtatttttattagagatggggtttttttatgttggttaggttggttttgaattttcgatttcgggtgattcgtttattttggttttttaaagtgttgggattataggtgtgagtaatcgcgtttggtcggttttttttaatttttttaaagagtttttattttttttttttggtatttgaatttttttggttttaagttataaaaatgattgtttttaatttgaatagaatagatgagttttgggaggatattgaatagtttatagaattaaaggaaggttagagaattaggtttaggagataaagaattagggtagttttagcggatgaggtagtaggaatcgacggtgttgttttggttatttgttgaaatgagtaagtgataaagggttttttttattttttttattttgtttattatttaaagttttagtagagagaatttgattagtttagtttaggtaaaggttaggggaaaaagtatattttaattatagtttattaggaatgtatataggtaattttttaaggaatttagtgattgtttttaggagaagagaatgtatgtaggatggttaaattttagaaaatatttattatattcgtatttttttttatttttattttttattttttttaattatttataataggggtgattaatatattttttaaggttgtgaaaaatatatagaaaaataaatttatttgtattggaattttttttagaaaggattaatggttgggaaagtttggttttatttattttttagtgttaaatataaggattaaagaaaatatatgtaaaatgtttattattttatttggtatgtagtaaggtttattaaatgttagttttattttatttttttttatttatttattgttgtgttgaagttagtttatattagtttatgagaagaattattatagttttaggaattttatgagttaattggtataatattggtagtttgaagttggtttttgtagagatagaaagatgtgattgttttttgtatttattttgagttatgattaatatttttataataaaagataggcgaataaaataaaagtataataaatttattttattttatgtatttatttttttgaaacggagttttatttttgtttaggttgtagtgaagtggtatgattatggtttattatagttttaattttttgggtttaagtaatttttttgatttagtttatagagtagttggaattataggtgtagattattatatataggtaattttttgtagagatggggttttattatgttatttaggttggtttcgaatttttgggtttaaattatttgtttgttttatttttttaaagtgttgggattataggtgtgagtttttgtgttcgattaataaatttattttattaaagttttatatgatatgggagtttttagaaatgaagattttagaaatgtttagagaaaataatttttttgattagtttcgatgaagaatggatagttaaggttgggtgtagtggtttatatttgtaattttagtattttgggaggttgaggtgggaggattatatgaggttaggagtttgagattagtttggttaatataatgaaatttcgtttgtattaaaaatataaaaattagtcgggcgtggtggtgtgtgtttgtaattttagttatttaggaggttgaggtaggagaattatttgaatttgggagatagaagttgtagtgagttgagatcgtgttattgtattttagtttaggttatagaatgaaattttgttttagaaaaaaaaaaaaaaaagaatagatagttatgtagaaatgtgattgaatataggttgggtacggtggtttatgtttgtaattttagtatttagggaggttaaggcgggcggattatttgaggtcgggagtttaagattagtttgattaatatggagaaattttatttttattaaaaatataaaattagttgggtatggtggtgcgtgtttgtaattttagttatttgggaggttgaggtaggagaatcgtttgaatttaggaggaggaggttgtagtgagttaagatagtgttattgtattttagtttgggtaataagagcgaaattttattttaaaaaaaaaaaaaagaaaagaaaagaaatgtgattgaatataaagtgaatggtcgtatgggaataggttgagggagaaagttagtagagtttgtttgttgggattttgtttggtttttttgtgtagtattttttttttttggatataggtagggattttttaaaataagggttttatgatttattattagaaaaggtagtttagtttttttttttttttttaatgagttgtgtttatatagaaaggtaaaggaaggttagagtaatagttttaagttttatgattggttttgggggaaagatattttggtttttttgatttgttttggaggagagaggggagtaggagaaggttagaggtagattttattttttaggttttttttatgttttttttaatttgttaaaatattaaattttggggtattattttttgagttttaatattttgatggaagtatttatattatagaaatcggaaatgttgtaagttagaatttttatttatttttagttttttattgtttttgagagttaaatatttataggttattgttatatttgttttttttttttttttataagttgtgagaagaattaagttagtattaggttgatttgtgagtgataaaaatcgaatagaataatggttttttagatggaagtttatttttttttgatagaaataaagtttagagttaggtaggtagttcggggttgggatagtttcgttttgttgttttattgtttttgatgtatggttttttgtgatttaggatgattgtttaggttttatgtttaggttaaggggaaagagaaggataaagaaatatatattttattttagtaggtttatagatagaagtaattcgtaatatttttgtttattttaaataggttggaaggaagtttttttgttatatttggttgttagggaggtttagagttttgttgttttttgtaggtagttatgtgttttgttgggggttgagaaggggaggataggggtcggggggtagttgagaagttaggtgggattcgagaatatgtaggggagagggagaattggtgttggtgtgatgggaatgagtatagtttgtggaattttgggggagttgattggaatagaaaattaaaaatattgataaatgaggttaaataaataaggtggaagttagagtttagtgagggattaggaaagtagataaaagaatttttatttgttgttattagatatcggaggtattgaattttttagtaggggagttatatgattagaggtattttagaaatgttaattttatatttaagtgttagatagattggaggtaggaggaaaaataggaagtagtagggaggttggaaaggagaattattttataagttaggtgtgaggtgattatcggggaatttgttttattagttacgtaggtttttttttatttttttaagtatcggttagtttgagaaataaagggatagagtataaaagagagaaattttaaagttgggtattcgggggagatattatatgttggtaggtttcgtgatgtttcgtaagtcgtaaaattagtaagtttttattagggatttttaaaaggggagggagtgtgtgaataggtgtgggttatagatattaagtattttataaggtaatagaatatcgaaaggtaaatggaggtagggcgggattataggattataggatcggggcgagattaaaattgttaatgaagtttttggtataattgttattgataatattttattaggagatagggttttgagagaaattggtttgattaaaatttattaggtaggaattttttttttttaataagtttgggagcgttatgggatattggggtttattttatttttatagtttcgattatagaagatggttacgtttaggggggttagtttagagatttatttttaggcgtgtatttttttttttagggatgttttttgttgagaaaaagaatttagtaatattttttttatttgtttttgaaagaagagaaatatggttttgtttcgtttagtttatcggcggttagagtttaaggttattttttttgttttttaaatattgttgttattttgttttttttttaaggtgtttagattttatattgtttaaatatatatgttttataatttgtgtagttaatgtaattattatagggttttgaggcgatatatattttttttggtttacgagatgataggattaagagattaaagtaaagatagttataggaaattataagggtattgattggggaagtgataagtgtttatgaaatttttataatttatgtttagagattgtagtaaagataggtataagaaattataaaagtattaatttggggaattaataaatgtttatgaaatttttataatttatatttttttgttatggttttagttggttttttcgtttggggtttttgattttttgaatagtgattatatggggataatgggaatgaggaggaagaatgagaggtatttgttagaaaatgtatttaaattgatggttggtttgaaagggagttgtaggttggggtgatgagagataggttttatagtaatagggtaaataaagtaaatttggtttggttggtgttttatttattattattatttttttgagatggagttttgtttttgttgtttagattggagtgtaatggtgtaattttagtttattgtaatttttgttttttagatttaagtgatttttttgttttagtttttcgagtagttggggtaataggtatgtgttattatggttagttaatttttttatttttattagagacggggttttattatgttggttaggttgatttttaatttttgattttaagtgattcgtttattttggttttttaaagtgttggaattataggtatgagttacggtattcggtttattattattattattttatttcgagatagggtttttttttgttatttaggttgaagtgtagtggtgtaattttagttttttgtaatttttgttttttgggtttaagcgatcgatttttttgttttagttttttaagtagttgggattataggcgtatgttataaagttaggttaattttttttttgtattttttgaagaggtaagattttgttgtgtttagtttgtttttaggttggttttgaatttatgagtttaaagtaatttgtttattttggttttttaaagtgttgggattgtaggtgtgagttattgtattcggtagtaggtgttttagattgggttattttgaagtagaatttggggtggggatttttgtttaagagatatattgcgggaggtttttaggagaaagattgaagaaaataggatagggaagggaaaaaggttaagtaaggatgtgagttttagtttgagtttatggggaagtttagggtagtaaattgtattagttaattgtatttggaggtatgggggttggcgttttgtagatttgttttaaggttaggtagttattgggagtttgtttagagtgtgtgtaagggaggagggtttggtttttgtttggtttagggtaattttttagaaaaggggataattgtgtgtggttattagttgatatttttaaaagttggaaagtgagtggatttattggtgaaaaggatttgagtttaaatagtgtttatgatagtgaatttattttggttgtgttggatttgaggtggtaaagaaataaggaattggtatgtgattgcgggaaattggagttataagataggagtttaggtgaaaagataggattaggtatgtagttattggagtgggggatttcggcgtatagatgatagggttttttgtttgtttgtttgtgagggtttttttgtttgtttgtttgtttgtttgtttggagagagggttttgttttgtaattttggttggagtatagtggtatgattatagttttttgtagttttgattttttaggtttaagagatcgttttattttagttttttgagtagttgatattataggtgtatgttattatttttagttaattttttaaatatttttttagagattgggggttttattgtgttgtttaggttggttttaaatttttgggtttaaatgattttgttgttttagttttttaaagttttgggattataggtgtgagttatggcgtaggtttagatgatagtttaaataagagggaatttgtatatttgttattttgggggttgttggtggtttttgaaggaagagttttatagtaggatagagtataaaattatatggtgacgtgaggtttagtaatgttttttatagttaatgtttttttattttgattaatttttaatatttttagggtattttttttttcgatttatgtgttgtttattttggtttgttttttgtgttttggttattttttgttgtttaataaattgttttaaaattttgtggtatgagataattttttattacgtttacggattttgtgggttaggaatttggatatatcgtagtggggatggtttgtttttgttttatgttatttggggttgtagttggaagattcgaaagttgggggattgaaatcgtttgtagatattttgtagtggatgttggtagttagtttagggattttagggtttttatttgtggtttagttagagttttttttgtatagtggttgggttgttgtgagggaattaggtatgaattgttttttttttttttgaggcggagttttatttttgttgtttaggttggagtgtagtggtgtagttatggtttattgtagttttgattatttaggtttaagtgatttttttgttttagtttttttggtagttggggttattgttaatatgtttggttgatttttgtattattattattattattttgtagagatagggttttattatgttgtttaggttggtttttaatttttgggtttaagtaatttgtttattttagttttttaaagtattgggattataggtgtgagttattgtgtttagttgtattttttttataattttatttttttttgatttgtattattttttttttattttattggttagagtagttatagtttcgtttttatttaaagagagggaatatggtttttatttggagtgttagttatgggataaggagagtaagtggaaaggggtatttaattttggaaaatattatcggttatattttatcggagtttttatttgttttttatgagtggtttttatttatttagttgttattgggttaataataatagtaatttgaggaattttttgagggtagggattaggtttgttacgtttgtttattttatttttatattttgagtattggtttaggaataagtatttgtggaaggacgggatttttttaagttttttatttattttttatatacggtattatttaattttaaattagttgttattattattttataattgaagaaattgaggtttagaggcgtaaatggttttttttagatgatttaggttttttgggttgatgtggtttttattaagaatttgttgtttttaatagtaaatagtatttttaggggttggggttgtttttttaaggtttttgtttttgtattttggtagtagtataggtttagttgtagggttgtggatagcgtgttttcggttgtttattgattggttggtatttgatatatatgatgatttaatatgaagatttagtgtgattttgtatttttttatgggagtagggttaggattaggttttgttgcggaatttagttttggggttgggtagaagattgggatgaagttgttttttatttttgtgttttggttatgagtaggtagtatttgggttaggagtgtgaggtgagtgggtgatgttaaggagggtttaggtggagtagttagattgtgttgagtaatttttttggaggggaagggggacgtggtggaggtagtttttggaggtttagtttagagcggagaaaggagttaattattatttttttttaagttatattttagttttgggaatattttataggtttcggggaaatttcggttaagtggtagagtgggtggtggggtgtttattatttatgattaggagtgggtgggggcggattttagagtttgtattaggttttaattttttaatttttgtttgtgatttattttcgcgtttattgtatattattaattaatttttgattttatttttttagttgattttttagagattgtagattaggaagggtttttggaaattatagtttttattttcgttgtgggggtagaaagtacgggataatttaattttttcgtgtttggaaagtaataaggaggattttgtttttattaggtttttaaggttttgtattagttttatagggattgttgaggggagttttttttttttggttttttatttttttttttatttaggtgtaggttgtttttgtttagttggtttgatagtagttttttgcgattttttatattattttcgattttttagttttatttttacgggttttgatgtattggtttcggttgtgttttttgtgagttatttttgttgttttgttttagttttattgatgggttttttgtttttttttatgtaggatttagttatcgttcgtgttattaatttttttggaatgtattttttttttagatatttatgttttttatattttttattattttgttaaaattagtaatgttttttttaatttttatgattaaaatagtatatgtttgttgtgggaaatttgtaatatgtaaaatatatataaaagagaataaaaagtattaataattttataatttaaattagttaatattatatttcggtggatttttatttggtatttttttcgttagaatttcgtttagttttaggtttttatgtgtgtttattgttttttttatttgtagttatgttttttgtttttttttttttttaatttgtgagtaaatttatttatttttattattttaagggttatttttttagagaaattttttttttatttttaagttagtttttttattatatatttataatatttagtatttttttttgtagtatttattataattagaaataaattattatttttgtttttttgtgtttaatgtttgtttagttatttgacgtaaggtttgtgattggtttttttgtttattttgatggttttagtatttattatagtgttttgtatttagaaaatatatattatatttagatgttttttcggaataattatgtgtttgtttttttagtatttataataattaatttaataaatataattaattaattattatgtgtttggtttggttttaggtataggatattaagtaaaatgatttagtttttattttcgaggaggttttagttttttgagggagatagattagtaatggaagttttttaatgtatagttaagtaaacggtgattaatagtgttaggtaaagtgtggaggagaggttcgtgaataattttggggagatgatattattgttttattttgttaatgtatttattttatagaattataggataatggaattggacggtattatgagattagtaggtttatttttttttgtatagatgaggaaattaaagtggtgaagggtagtgaagttatttagttaaagttattgggtgatagatttgggaatagaatttggatttttagatttttagtttagggttttttttattgtatttgggggtttttggatttttttttttttttttttttattttgttaatttttaagttttttgattttttttatgaaggtttttttaatttttttatttttttttatttttatattattaggttttaagtttttaatattatttttagtttgagtatttatttttattttttattttatttttttgtttttagttttgttttgtttagatgttttttttattttgtcgttaaaatgagttttatagatgtacgtatgtttgtttttggtttagaattttagtggttttttattaggtttttagaaatatatttaaaatttttatatggtgtattagttagtttaggttgttataataaaatattttagacggggtggtttaaataatagaagtttattttttatagttttggaagttgagaagtttaagattaaagtgttggtaaggttagttttatttagatttttagagttttttttttttttttttttttattttattttattttatttttttattttttttgagatagtattttgttttgttgtttaggttggagtgtaatggcgtgatttcgggtttaagtgatttttttgttttagtttttcgagtagttgtgattgtaggtgttcgttattatatttagttaatttgatatttttaatagagacggggttttattatgttggttaggatggtttcgattttttgattttgtgatttgtttgtttcggttttttaaagtgttgggattataggcgtaagttattacgtttggtttttttttttttttttttttttttttttttgagatagagagagttttgttttgttatttaggttagagtgtaatggtatgatttcggtttattgtaaattttgttttttaggtttaagtgatttttttgttttagttttttgagtagttgggattataggcgtttattattatgtttggttaatttttgatttttagtagagacggggttttattatgttggttaggttgtttttaaatttttgattttaggtgatttattttttttagttttttaaagtgttgggattataggtgtgagttatcgtatttggtttagagttttttttatttcgttgtaggtggtcgttattttgttttgtatttatatggttttttcgtgtatgtggggagagagagtttttttgtgtattttgttttttttataagaatattagttttattagattagggttttatttttaggattttatttaatttgaattatttaaaaattttatttttaaatatagtcgtattgagagttaggggtttaatatacgaatttggggggatataatttattttatagtgtagggtttattgggttttttttggttgagtttattttattagttttttttaaatttaatttatttttttgtttgtacgtttttatattttggaatttttttggttttttcgatttgtttggattttttgtagtttaggttttttttttttttgttttgatgtttttatatttttattatttttaagttttagtttgaatattagtttttaggagaggttttttttgatttgtattttgtgttaggttttttggttatatatgtttatggtattttgaattttattttgtgtaagagttattattttagttttgtgtgttttatatttgtttttttgagttttataaggtaggaagatttttgtttggttggttgtagtatttttagggttagtatagtgtttggtgtttattaagtagttaagattaatttttattggtagatgtttaatatatttttattgatttgagttgtttttagagagtatatgtattttgttgtttaatttgggttgaaattttttagaagggttttatttgttttttatttgaaattttttatttcgtgtttattttgggtttttttatttaggaaatatttttataaatgattattaattgatttttttataatttttttaatatgtattatatttgaaggaataattatatttaaaagaatatgttatatagtaggatagtttattatgaatgttatgtaataataatttattgagaattaaaaagaaattaaagtgtttttttttttttttatttttgggtaattaggattttatttttttgaaattgtggattttttgatttttgaggtgtttggttttttgtgtatgttttagaaggaatagaaagaattaggttgggtggggttgtaaaggaaatttattttaagtaggtttcgttttggaagagttggaaagatatttgtggtgttagatggtatgagagtatagggtgtgagggtaggagtttattttttggttgatttttagatttttatggatttatggaaaagagaaggggtgtaggttgggtataatagtttatatttgtaattttagtattttgggaggtcgaggtgggtagattatttgaggttaggagtttgagattagtttagttaatatggtgaaatttcgtttttattaaaaatataaaaattagttgggcgtggtggtgggtgtttgtaattttagttattcgggaggttgaggtaagagaatcgtttgaatttgggaggcggaggttgtagtgagttgaagttattttattgtattttagtttgggtaataagagtaagattttgttttaaaaaaaaaaaaaattagaatggtggttagtttggagtgaggtgggtaggaaagagggtgttatatattgattgtaagggaaataagggagatttttgggttgaagttattttgtttagatggtggttaaatgggtaaatataaatgtaaaagtttatcggtttgttttttgttgatagttaattagttaattaatttaatttaaaaaaattaattggggttaggtatatcggtttatttttgtaattttagtattttaggagattgaggtaggaggattgtttgagtttagatgtttaagattagtttgggtaatatggtgaaattttgtttttgtaaaaaatataaaaattatttgggtatagtggtgtacgtttgtaattttagttgtttaggttgaggtagaaggattatttgagtttaggaggttgaagttgtagtgaattattattatgttattattttagtttgggtaatatagtgaaattttgtttaaaaaaagaaaagaaaaggaaaaggagaaaaatattaaattgtatatatttttaaaatgaaaaaaggaaataaattattgatatatgtaatgatttggatgaattttaaaggtattacgttgagtgaaaaaagtttttaaaagttatagattgtatgattttatttatgtgatatttttgaaaagataaaacgatagtaatagagattagattaaaatagtaaaatagtagggagtttgtcgggggtaggaaagaggatgggattataaaggggtagttcgagggagtgttttaggtagtggagttattttgttttagtggtggtgattatatgatcgattgtggtgattatatgaatttttatatatgtgaaatttataggattgtttattgaaaaaaattaattttattttatgttaatttttaaaataaaattatttttaattaagaagagattttttagttttttaatagcgtagaggagtttttgaaaggaggcgttaaggaattggttattttggaaaaggtatattatttttttcgttttgtttgtattaggtttggggatttttttgggttttttgtggtttttattttttttttttgtttttttgttgggttagagtgatttatatatttttttttttagtatttaagtttcggggtttaggaagttagtgtgttttgtttatttttacgttttcggtttttgagatataggtacgaggtggttgtttattgatagagtgaaggaatgttttagtattaggtttgattcgttttggtatattttataggtttttttatgtttagttttttttttagttgtttagaggatacgttatagttgggagatattattgtcgaggtgtgggttataagtttattttttttatgaggtagggttattagtttttttatcgtttgaagaatttagtaatttgagtttattattgttgttattttaattttgaaatatatttttattatataagaaaatttgtttaattaaaaaaaaaatagttaaaaaaaaagggagattcggttttattttttagatttataattgttattagatttttttttatttatttagaaatatttatgtgaaggtaggtatgtatgtttatatatatgtaatagatatgattgttttatagtttttgggttataagtaatgttttgtttttttgtggatttatttaaatagattttgggtttagttttgtttattattgattggaattttagtgttagatagtttttaggtttttttttttaggttatataagatgtttagattgatgtagtattgatgaaacggaagagtttgtttttttggttatatggttagtatttgttagttgtttgtttaggttagtggggattattatgagttaggttgttggtggggtgtggtggtttacgtttgtaattttagtattttgggaggttaaggtgggtggattatttgaggataggaatttttgatttaagtgatttgttttttttggttttttaaagtgttgagattataggcgtgagtattgcgtttggtttattttgatttttgttattataaattggttttgtttggaaggtttttaataattgtggtgtaagttttataatttatttggttttgttttgggaattagaagttttttaatgttttggagagagattttgatgttttttattagaagttatgttttggggttagtgagtaaagatgagttttttattttttttttttttgggttttagtaagttaagttttatagtagtgtttaaaaagttggtagaaaaggtttaattttttttttttttttttaggtagagtttggttttgtcgtttaggttggagtgtagtggcgcgatttcggtttattgtaagtttcgtttttcgtgttttcgttatttttttgttttagtttttttagtagttgggattataggcgtttgttatcgcgttcggttaattttttttgtattttttagtagagacggggttttattgtgttagttaggatggtttcgattttttgatttcgtgattttttcgttttggttttttaaagtgttgggattataggcgtgagatatcgtgttcggtttttttttttttttttttttgagatagagttttggtttgttgtcgaggttggagtgtagtggtattattttagtttattgtaatttttgttttttgggtttaagtgatttttcggttttagttttttaagtagttgggattataggtatatattatttcgttagttaattttttgtagttttagtagagatagggtttagttatgttggttaggttggtttcgaatttttggttttaagtgattcgtttattttagttttttaaagtgttggtattataggtatgagttattgtgtttggttaggtttagtattttaaaaatttagtggaggggaaggttatagttttaggaattaaaaggtatgggtttattttttttttttgatatttgttgtatgtttttgaataaattatgtaaattttttgagttttagttattttattagtaaagtgggaatagtaatatttattgtgattattagatttatttttaaatatttgaggtttttttttttttaaagggtgtaagaaaattgaattttgttattttatttaatttttatttattaatttaggcgtggttacgtgatttattgaggttaattaaaatggtgttttttaggtggaagttttaaaagttagtgtatgtttttttatattttttttttttttttaattatagtaattggtgatattttatatagtggttgttttgttaatttgggttttggagttaggataatgatagtttagagtagagtttcggttaatttattatggatatgtggtaggagagttaatgaagttttgttgtataaaagttattgagatttgggggttgtttgttattgaagtataatttagtttgtttggttgatatattatattatatatttattattaagattatgtgaagtaaaatgtttggaattttttggtatataataaagttgatttttttttttttagattttttttttttttttttaagagttatgaatttagggatatttttttttttgagatagaattttgttttgttatttaggttggcgtgtagtggcgtgattatagtttattgtaggtttttttttttgattttaagtaatttttttttattttagtttttcgagtagttgggattgtagatatattttgttatatttagttgatttttttattttttgtagagatagggttttattatgttgtttaggttggttttgaattattgggtttaagtgatttttttgttttggtttgttagagtgttggattataggtatgagttatcgtatttggtttttaggaatgtttttattagtttttaattttggttaaagggtaatagaatagagagttatttaattataaaagaaaaaggaagaagaaaggatataaagtaataaaggtatagaaatgtaatatagaggaaaggaaaagaaataaagtgataaagaaggcgagataaagtataaaaatagggaagaaagaggtatagagggttaggtagggtggtttacgtttataattttagtaatttgggaggtttagttagatggattatttgaggttaggagtgtaagattagtttggttaatatgttgaaatttcgtttttattaaaaatataaaaattagttggttttagtggtgtaggtttgtaattttagttatttgggtggttgaggtatgaggatcgtttggaattgggaagtagaggttgtagtgaggtgagagtgcgttattgtattttagtttgggttatagagtgagattttgttttaaaaaataaaaaataaataaataaataaaaataaaaaaaaataaaataaaataaaataaaaaaataggtataagggatgtttgaggtatagatagaggtgatttttagaaaaataaaagaaaataaaaggaaaaattattgaggtaaagggaaattgtattttttggaattgttggttttaattttaggtaaataatatttttttttaagataaatgaataaataaattttggtaaatagagtttttgggtgtgtatttattagtttttttattcggtttattgggcgtttattttgtgtttgatattgtgtttgggttggttttataggggtaattaagatttagtgttggtttttgtttttaaggagtttttagattggtgtgaaatagatataagaatagttgggatttaatttggtttgtgtaatgatggaagtgttaggaggaattaagggaagagaaggggaagtaggttttgtaaaggggttttttggaaaatttgagtttgagtgttttgaaggataattaggagttagtaatggtaaggtttttgaggagaaagagggattacgatgggtagaggggtaataggagttaggtagttgtaggtagtttggggttgttggatttttgatgagaggttgtgggtagtaggagatgaggttggagagggatttagggttttattatagagatttaaatgttaagatgttggtttttaagtggatgggttcggggatatttgggttgttatgtggggaagtgatatggttagatttttagttaaattgttttgtttgttatgtggatagtgtgttggggtagtatttttttgtatgaggtttttggggattgggttgaatatttatttagtttagggtttgtaagtggataggatggtttttggaagaattattttagtcgttgttttattagtgttttaggggagtgatggttatttgcggtggtggcgttggggtaaaagaatttattagtcgggcgtagtggtttacgtttataattttagtattttgggaggtcgaggcgggtggattatttaaggttaggagtttgagattagtttggttaatatggtaaaattttgtttttattaaaaatataaaagttagtcgggcgcggtggtgggtgtttgtaatttaattttagttattcgagaggttgaggtaggagaattgtttgaatttgggaggcggagtttgtagtgagtcgagattgcgttacggtattttagtttgggtgatagagtgagattttattttaaaaaaagaaaaaaaaaatttattaaggtagttgtaggtagagaaaggtagatttattatagtaattaggaaaacgttagggttgtagggaggtaatttgtatttttttgttagttgggatgtttggaaagttgaagtgtttgatggtaagtaggaagtttgtgagttttgttatttgagtaggagttggggtttgtaaagtagttaatagttgagtttgttttttggtttcgtgtttgttttttttttagttttgttttttttattttgtttttggttataaagattgaggaggttaatttggtaattttttgtataggggttatgttgtgttatataagaaaattagatgtttttttttgagagtttggcggtagaatttgttataattttttatagtttagaggtaagtttgtaggaacggacggggtttgttttatggtgggattggaaaatatgtcgttttggggtaatgttaattagggatatgaattgtatttttttgcggggggtattttattgagatgaatagagggttttatttatatttatagagggatttggatgtattttttaaagggggtattttattaattagaaaagattttttggtcgtttaggggttttatgttggatggttagtttaggtatttatttatgttgggtgattagtttaggtacgaggaaaaagaagggtaaaggaagatttttatttggttttggtttaggaggtggggtgggtaagagaagatttatcgttttgaggttgtttgatattatttgatttagtaaggtttaggataggatggttggttgattttataggtgaatttagagtgagaaagagagcgtttgagttatttaaaacgtgtgtgagtttgtttcgaataagtttttgttgttaattgtgttatatatagggatgagggatttgtaattagagaagatgggtaatagttttttttttttttaggtagggtagttagttttgtttattttgggtttttaggtaatattggagagtggttttggttagttatttttgattgttagagagatattagaagttggttgttgaaagattgaaaaaagaaaaaaagttaggttatttatttaaattaggtaatgatgattagatgtttttatatggatagatattttttagttttattggagtgtagttttggttagagatttgtaattgtttttgtgtttagatgttgtttttcgagggtttcgagttgggaaagggaaaggagagagagtttttgtatggagagggagagttttttgtatgggttattaaaatgttttaggggagtaacggttatttgggttggcggtttaggggtaagagaatttattaagatagttgtaggtagagaaaggtaaatttattagagaaagtagaaaaataggagagtaatgggtaggagagtaacgggtaggttagtagaagaggagttgattgtaaggaaataaaggtttgttggggattttgtaggatggtttttaggttgtagagtgttatgtgtagtattgattatgttagggtagtagggaggtaatttgtatttttttttttttttttttgttagttagggtgtttgataaattgaggtgtttgatggtaagtagaagtttttgagttatgtatattatttgagtaggagggttatatgttttgggttatttgttttatttttttgtttttttttggttttattagtttgatttgttttttaattattatttaatagtgagtgttgttatatgttgggtattgtgttatgtgttttatgtggagtaatttatttattgtttttttattttttaagattattttgtgatatgggtatttttttttttttgagatggagttttgttttgttattaggttggagtgtagaggtgtgattttggtttattgtaattttcgttttacgggtttaagcgatttttttgttttagttttttgagtagttgggattataggtgcgtgttattacgtttaattaatttttgtgtttttagtagagacgggtttttattacgttggttaggatggttttaattttttgatttggtgatttatttattttagttttttaaagttttgggattataggcgtgagttattatattcgattagatatgggtatttttatttttattttgattgagtaattgggtatagagaggttgttatgtattttaattgtagagttaggtagcggtaagtttatttttatatagcgttagttgtttggttttgggattagtttgtagttattttttattttgttttttaggatttgttttttttaggaagttttttatagaggtagaattttgtattggtattttgttttaagtttatgaaattttttatatagatgattttattttagttttgtaataatagtttttgtgaggtattattatttatagttttaaaaaagttagttgaaggaaatttagtgatttgttaaaggttagaagttaggtggtcgtttttttgtttagatttacgttttttgatttggagtatagtgtttcgtttttacgttatttgttagttgacgttgtagttagttttatatttaatatattatatggttcgaaggttaggttattttttattattattgagttgttttttttttatgaaaatgtttttttggattgagggagatagttatagagaaatgtgttgttggtatcgattttttatggttgggtaatggttttcgttatttggattaggtgacgttagttatttggatttttgttagtatttttcggtttaggaaatagattttcggttgtttgggttttgagttattttcggttttttgggtgagtgggttttgtaattcgtaaagtgaggaattgaaaagttagtttttagggaagattttattgtataaagttaggtaaaaatggggaagaggtatattgggttagagagatagggagtttttttatttgagtttggggttttttttagatgagaggggaggatttagtgattagatagggaaattgaagatttttgtgattaagatttaagttaattgggggtagatgaggagtaaggtaagtaaagttaaagaaatttggggaaagatatatataaagatataaatatagaaggttaaatattggttaaggatagaatgttgattttaaaatttatgtatttttttgtggatattgagatttgaataaattaataatttgagaatgtaagtagttttttgttatgttatattttgttgagttatataatagttgggggaaaatttaaataatggtatatgtgttaaggtagatagttaaattgtttttttattattttttgttttatttttaattttgttttttaggttaggtttataaaagttgttatttattttagttatttttttagttaatatttattttatttatttttataattattttgtgaggtaagagttattattatgtttttattttgaaaattgtagtaaaatagatatagaatttagtattttaattgtttgtaaatatatagtttagtggtattaggtatatttatattattgtgtaattattattattagttatatttagaatttttttatttttttttattgaaattttatttagtaaataatatttttatattttttattttttttagttttggtaattattattttattttttgtagaatgtaattattttagatgttttttattttattttttatttatttgtttttttgagacggagtttttttttgttattaagttagagtgttgtggtacgattttggtttattgtaatttttgttttttgggttttagtgatttttttgttttagtttttcgagtagttgggattataggaatacgttattacgtttagttaatttttgtatttttagtagagacggggttttattatgttggttaggatgtaggtgttttttataagtggaataataggttgggcgcgatggtttatacgtgtaattttagtattttgggagattaagtttgatggattatttgaggttaggagttcgagattagtttgtttaatatggtaaaattttatttttattaaaaatataaaaattagttgggtatgttgtcgtgtgtttgtaattttagttatttgggagattgaggtataagaattgtttgaacgcgggaggtagaggttgtagtgagttgagtttacgttattgtattttagtaagattttgttttaaaaaaagtggaatcggttaggtatggtggtttacgagtgtaattttagtattttgggaggtcgaagtgggcggattatttgaggttaggaatttaagattagtttggttaatattgcgaaatttcgtttttatttaaaatataaaaattagttgggcgtggtggtgggcgtttgtaattttagttatttgagaagttgaggtagaagaatcgtttgaatttaggaggcgagtttgtggtgagtcgagatcgttttagtttgggtgatagagtaaaattttgtttaaaaaaaaaaaaaaaggtggaattataaaatatttttttttttgtgattggtttttttttttttttgagatggatttttgtttttgttgtttaggttggagtgtaatggtataattttggtttatcgtaatttttgttttttaggtttaagttatttttttgttttagtttttcgagtagttgggattataggtatgtattaatatattgggttaattttttgtatttttggtagagatagggtttttttatgttggttaggttggttttaaatttttgattttaggtgatttattcgttttagttttttaaagtgttaggattataggtatgaggtattacgttcgattatgattggtttttattttatttagtaggatgtttttaaggtttatttatattgtagtgtatattagaattttttttttaaaaaaatattttattatatgtatatatgtattatataattttttttttttttttgggtggagatagagtttttttttgttgtttaggttggaatgtagtggtgcgattttagtttattgtaattttagtttttttggtttaagttaattttttattattttagttttttgagtagttgggattataggtatgtattattatgtttggttaatttttgtgtttttggtagagatgaggttttattaagttgtttaggttggtttcgaatttttaggtttaagtaatttttttattttagttttttaaagtgtttggattataggtgtgagttattaggtttggttatattttgtttatttatttatttattgatggatatttggatggtttttattttttggttattgtgaatgatgttgttgtgaatgtgggtatataatttaataatatttatattgagatataatttatatattatataatttattttgtaagaggtggaggttgtagtgtggtgagtcgagattatgtttttgtattttagtttggggggtataaagtgagacgttattttaaaaaaaaaaaaaatttattttttaaaaatgtataatgaaatgtgttttttttttttttttttttgagatagagttttattttattgtttaggttggagtgtagtggtttagttttggtttattgttatttttgtcgttttggtttaagcgatatttttgtttagattagagtagttaggattataggtttttgttatcgtgttcggttaatttttgtatttttagtagagatggggttttattattttggttaggttggttttgaatttttgattacgtgatttatttatttcggttttttaaagtgttgggattataggcgtgagtcgtcgtattcggtagaaatggtttttagtatatttatagagttgtgtaattattattataattttagaatatttttattatatttaaagacgttttatgtttattagtagttattttcggttttatttttaattttttttttttttagttttaagtaattattaatttattttttgtttttatagatttgtttatattggatattttatataaataattatataatatgtggtattttatgtttggttttttttatttagtatagtgtttttagtgttgtagtatgaattagtattttttttttattgttgaatattattttattgtatggatatattatattttatttatatatttattagttgatggatatttatattgtttttaaattttagttattatgaataatgttagtgtgaatatttatgtataagattttgtgtggatatttattttttttttggtatatatttaggagtggaatttcgaggttattaattttatgttttatttttgagaattgttttttaatgttgttgagttatttgatatttttattagtagtgtatgaaggttttagtttttttagtttgtttttttgattttagttattttagtgggtatgaagtggtattttatggtggtttagatttgtatttttttggtggttaatgatgttgaatatttttttttttttttttttgagatggagtttcgttttgtcgtttaggttggaatgtagtggtacgattttagtttattgtaatttttgttttttgggtttaagcgatttttttgttttagttttttgagtagttgggattataggtgtgtattattatttttggttatttttttatatttttattagagatagggttttagtatgttggttaggttggttttaaatttttgattttaagtgattcgtttatttcggttttttaaagtgttgagttatcgcgtttggtttgaacgtttttttatgtgtttattggttatttgtatatttttggagaaatgtttatttagattttttgcgtattttttaattgagttgtttttttattattgagttgtaagagtttgttataaattttaaatataagttttttaattgatatataatttataaatattttattttattttatgggttttttttatttgttttttttttttttttttttttttttttttttttttttaatagcgatagggtttcgttttgttgtttaggttgatttcgaatttttgggtttaagtaatttttttggtttggttttttaaagtgtttgggttataggtatgggttattatgtttagtttatttttttaatgttttttgaagtataaaagttttaaattttgaagtttaatttatttattttttttttttgtttgtgtattgtgttatagttaagaaattattgtttagtttgtggttataaagatttatatttgtttttttttttaagaatttaatagttttattttttttatgtaggtttttgatttattttgaataaatttttgtttatggtatgaggtaagggtttaattttatttttttgtatgtgtatatttagtggttttagtattagtatgttttgttacggaggaataaatttttagtttcgtaagaaaaggattatgggtttggtaaggttgtttatgtttgtaattttagtattttgggaggttaaggtgggagtattatttgagttttggagttcgagattagtttgggtattagagtgagatttcgtttttatttaaaaaagaaaaggaaagaaaagaaaaaggattgtgttcggttttgtttattattatttttttaggatttttttagttttatgtaagatatatgttatatgtttaataaatatagtttgagtgagtgaatatatgagtgattgagatttagtgtggttaaataatttgtataggttagttagttggaaggtggttagatatggtttaaatttagatttttttatttaatttttttttttttttttgagatggagttttgtcgttaggttggagtgtagtggtatgatttcggtttattgtaatttttattttttaggttgaagcgatttttttgttttagttttttgagtagttgggattataggcgcgtattattacgtttagttaatttttgtgtttttagtagagatagggttttattatgttggttaggatggtttcgatattttgattttatgattcgtttgtttcggttttttaaagcgttgggattataggtatgagttattgtatttggtttttttatttaattttaattaagagtttttgtataatattttaaagtttttgaaaattttttgagttattaaaagttttttgttataagaaattatattttttaggttgggggtggtgtttacgtttgtaattttaatattttgggaggttgaggtgggtggaatatttgaggttaggagttcgagattagtttggttatatggtgaaattttgtttttattaaaagtataaaaattagtcgggcgtggtggtaagtatttgtaattttagttattggggaggttgaggtagggaatcgtttgaattcgggggtagaggttgtagtgagtcgagattatgttattttattttagtttgggtaaaagagtgagatttcgttttaaaaaaataaaataaaataaaataaaataaaataaaaataaaaataaaaataaaaaataaaaagaaacggtatttttttaaagttttatttgttgtttttgttgtatgattttaattattttattgtttgtgagtagtaaaatttaaatttagggagttttatgttttttttgtttttgattttttttttattcgagttatagagttaaagattttatttttttttagggtagttttatagttggaaagtttttttaaatttcggattataattttttgttgtaaaattgtgttataaatttttatgagtgtttagtgtaattattgattataggatttggtttgatgtgggaggtatttggggtttgcggaaagttttatgtgttttgtttcgtataaagggtagttttggggtagtcgatgtttttgttttggttttgatatgttgttttttttttgaagtgtggtttttgattttgggtgtagtttgttatattagaggagaatgaagttaggtggtatgaattttagaaaattttggtgaatttattttttggaatgaggataaaggagagttttgaagtagaaaagagttgtgttttttgaaggggtttaaagttaaagtttatattggggtggattgggtagatttatttgttttttttttgatagtgatgtatttgagttttttttattgggttttttggaaaagaattttttgaattattagaaaattaggatagggtgggggtaaaagaaaacgtatattgagagtttgttttatgtatttgttaggtatttaatttaggtatttaattttatttttaaagtaattttgtgggttggttttattaattttattttgtagagttggatgttgaaatttgtagttatataaggatttgaatttagagtttttttaaagttcgtattttttttagtattttgagttaggggagttagcgggtagaaatgacgtgtgaggtattttttttttttttatttttatgtgatttgttatttattttgttaagatattttgggttttaggtaagttttagtgatttttttgaattagtggtgtgttggagttagtttagatttgttagtgagagtgttaaatatttaggaaatttgtaagttggttgttaaattgttagtggttggaaattggttatgggaggaagtatttatattacggaataattatatacggataattgttataaattagggatttttattttttttataagttggtttgttaatatattattgttttttttttttttttttttttttttgagatagagttttattttgtcgtttaggttggaatgttgtggcgtgattttggtttagtgtagtttttgttttttaggtttaagtaatttttttgtttaagtagttgggattataggtacgtgttattatgtttggtaattttcgtatttttagtagagatagggtttcgtaatgttggttaggttagttttgaatttttggttttaagtgatttattagattcggttttttaaagtgttgggattataggtgtgagttatcgcgttcggtttagagtattaattttggggtttagagtgagagttgaagagaatagggtttgtttttagtagttatagagttttagttgtagattgagggaagatcgatagtatttatgggaaagtgtgtgtataaaagagatagaaaagaggttggagaatattgattatttatatatgaataaagtaagtattaatgttattaattttagggattttgttgggaggagttttggtttgttattagggttttttttttttagattaagaaaagggagatttaatttatgaagaaattagaaaagtgttttggattggtgggagtgtggtgggggtggtgttgtataatatagaagaggggaattttgattttgagtttgaggttttgggatgaaaagtagtttgtggatcggatttttgattttggggttatagtaggaatttttttgtttgataggtggtgatttttttttggtaaggtttttagatttttaaggtagaagtaatttttttattttagtttgttaagtagttgggattataggtgtttattaatatatttggttaatttttgtgtttttttggtagagatggggttattttaggttgggatttgtgaagagtagaataattttaagttttagggtaaaaatttgtagagttgagttttatgttattttggggtattttatttgaggtttggaattagaggtttttcgtagtttgtgtagatgttgttaaaaggttgagttcggtggtttatgtttgtaattttagtattgtgggaggttgaggtaggtagattatttgaatttaggagtttgagattagtttgggttatatggtgtatttttatttttataaaaaatataaaaattagttaggtgtgttggtgagtatttgtagtattaattatttgggaggttgaggtgggaggattgttttaggggtttgaggttgtagtgagttatgattatgttattgtattttagtttgggtaatagaatgagattttattttaaaaataattaaaaagatgttgtaaagaaatagtagttttttgtaataaaataagtggtatattttttgtgatgggagtatttttttggggagcgaagttggacgttgtagttttattttgtttttagaggtttttttgtttttttatgtttatgaataagtatagttgaggttattagtattgtatatatttggaatagttttgttaaaataggatttttttaaaggttaagagttaaggaaagagaaagtgaaggattgagtagtaggtaattagaattagagttattgaaggtaattgtaggagttgtttttttttggtttttttttatggtaattttttgagtttgagtagagaaggttagagacgtatggaggtttttattttttttgtgaaaggtttttttttgagttttaggtttttatttgatgatttattttatttatgtttgtttaatatttgaatggttattttttttagagattatttttatttttaggtgtgtgatttttttttatagattatagtgggaaagatattatttttaggtaattttaatatagtgaggggtggagcggggatgtggttattcgttttaggtattgttgatttttttgaggtttaatttagggttagagattgtgattaaagagatatttagattgggtatgcgtgtaaagggtaagagttatgagattaatgtgatatttaggattaattagttttttttatagggtaggttgttatttattggtatagtttttgggttgagtttggtagagtttattagtaaggtagatattggaatgtgtgtgtaatggagggaggtttaaatttagaggttgttggtttttattaagtagagagaggttagaatttagtggtatagaaattgatattagttaaatatgggttagttattaattttgtattattttttttaatttttgagaaagtttttttttattgtttgtttatatttatttatttaataaataattatgaatttttttttaggtgttaggtgttatataagatattggttatagtagcgaataggatagttcgttttatttttatggaggttataggataatgagaagaaagatttttttatttttatttttttgagacggagttttgtttttgttgtcgaggttggagtgtagtggtgtgatttcgatttattgtaattttcgttttttaagtttaagtaattattttgttttaggttttttgagtagttgggattataggtatttgttattatttttggttaattttttgtatttttagtagagataggggttttattatgttggttaggttggtttcgaatttttgattttaggtgatttatttatttcggttttttaaagtgtagggattataggtatgagttatcgaattcggtttaagaagaaagatattgaataagtaattatagggtattgggtgttatgaaagaaaagtatggtattgtataatgaggttatttaatttagtttggggtgataaggaatgtttattaaagaaggtatcgtttaagatatatttggggaatagcggtagtgaaaatagaagttttagaaatgtagggattatggttgatatgtttattatgttagtgtttggtatggaagaggtttaatttttttggttgaaaggatgaagtaatttagttgaataaagggtgtgtgcgtgtacgtaggtgtgtttgtagttaatttttttttagtttagtttaggaaatagtttttgtaaaattgcgtaattagtagtaggtgagagaggaatacgaatgatatatatattattaaagataatttattaatagtatgagttcgatatagatttttttttatttgggtttgaattttgagtttattatttattagttgtgagaaagtgaatgagttgttttttttttttgtgtttttgttttttgtaaattttatttttaagtattatgaggataaaagataatgtatatacgttgtttggtatattatagttaatgtttggtaattattattgttattttttaaaaaattattattattattttttgagacggattttcgttttgtcgtttaggttggagtgtagtggcgttattttggtttattgtaagttttgttttttgggtttatattatttttttgtttcggttttttgagtagttgggattataggcgttcgtaattacgttcggttaattttttgtatttttagtagagacggggttttattgtgttagttaggatggtttcgattttttaatttcgtgattcgtttgtttcggttttttaaagtgttgggattataggcgcgagttatcgtgttcggttttattattgttatttatgtatattaaatttatatttaaagggattttgatagttataagaaaagatatataagtttagatattattgaataagagtaaaataataaattaagtaggaatggaggggaggatatgtatgtagtattagataatatttatatagagagaggatgaggttttggaagatgagtttgaagatttttttgttggagaggggttttatgttcggtatgttgattgtttttataattttatttttatattttattttaattataagatagttttgttttggggagtttagagtttttattttttatttatttatttattttttgagatggagttttattttgttattttggttgaagtgtaatggtatgattttagtttattataatttttgttttttaggtttaagcgatttttttgttttagttttttgagtaattgggattataggtacgtgttattaagtttagttaatttttgtatttttagtagagatggggttttattatgttggttaggttggtttcgaatttttgatttcgtgagttgtttatttcggttttttaaagtgttgggattataggcgtgagttattgcgttcggttttagagtttttatttattatttagagagggttttattttgttatttaggttgtagtgtagtggtgcgattttggtttattgtagttttaattttttaggtttaagtaatttttttattttagttttttgagtaattggggttataggtttatattattatgtttggttaattttttaaaaaaatttttatagagataaggttttgttatgttgtttaggttggttttgaatttttgggtttaagtgatttttttgttttagttttttaaagtgttgggattatagatattagttatcgtgtttagtttagaattttttaatttttaaaatttattggtgtggggttagatgagggattttaaaaggagagggaggttgttgtgtagtgattttatcggtttgtttgtaggaaggagagtcgatttttttttgatttttattaaagatattagagagttttgtaaattttttaattagatgatatataaatatttttttaggttttttaggtttgatttaataatatttatttcgagaggttgttgttttttgtttgtatttttttattataagttatttgttgtttttatttttatttaagttttgtatcgtattttgtgagaaatgtttgagttggttggatatattttttgaaattatttttttagttttttacgaaatgtttgtatttatgttggaattatagagttgaattattattgagataaaaattttagtttttattttaatttataatttttaaaaattgttatttttttagatttttttatatttttattatttttttttttttttgttttttgttttttgttttttgagattgagttttgtttttgttgtttaggttggagtgtaatggtgcgatttcggtttattgtaattttcgttttttagatttaagtgattttttttgttttagttttttgagtagttgggattataggcgttcgttattatgttcggttaatttttgtatttttagtagagatagggttttattatatttggtaggttggttttaaatttttgattttggttttttaaagtattgggattataggcgtaagttattatatttggttagatatttttattgtttttattatttgtgtaagtaagtggttttattgggaggcgatttttataaagaaataaggttttttaaaaaaggtgtttttcgtaggtttttgtttgtgagattatttgttgagaaatgtagagtcgttttgggaagttgggtagttagtttttatttatatttatttaattatgtttagttgggtagtgttatttgtgtttgagttttagtaaaattgtatgtttttaaatgttaggggtttttatagataagtgaagtaattagaaatattgaatttttagatggatatgtttatcgtattgaatttttatagttaggaggtatagataattaataaagttttgtgttttattattgttttattgatttattgaaataatgttgggtatgattgtggttatagagttaagttttattgttaattatatggtttggtgagggaaagagttttttttgtttttgttttggttagattaatgtaaatatagtttaaatgttgtttttttattggggatagaaaaatttatatgtggtttacgtttgtaattttagtattttggaaggttaaggtaggtagattgtttgagtttaggagtttgagattggtttgggtaagatgataaaattttgtttttattaaaaataaaaaataaaaaattaatttaatttaaaaaattgaggtgagaggattatttgagtttggggatgttaaggttgttatgagttatgtttgtgttattgtattttattatggatgatagagtaagattttattttaaaaaaaaaatttacgtaatatagtttatatttttgttttttatgtaaattttttttttttgtgtgttattattagtatgtaattattgaaattttaaggtatgatttttgttaggaaatgatagagaaaaaataattgttttataattattttttatattgtgattttttgtaaataaatatattttatttttagttttatttatttattataaaattgtaagaggtggaataagtttttgtttagagatgtgatttatgtgttgtttgttggagtttttgaaaataaataaataaataaaaaaatttaagatagtagatggttagatgagttattgggaatggagtaatggttggttatggtttttgttaaatataaagttttgattggagaagtttggaattttttggatgttttttgtaaagatgataaatttttttagataggttgttgtttgaaggtaagatggaagaagttttgtttattgtattatggaggtttttgatttttatttttttttattttatgaatttagattttttatattagatttgggttgttttttagtatttttgttgtatattgtatgaaattttttagttattttatataatttttaggtgtttgaaatacgaaatgcgtaagagatatgtttttgagatgtcggagtgaggttttttttgagagaaggaagtgagggttgttgtttatagattgttgagggtaataatgggatgaggtataaaaaggatttagtttagtagtaggtatgtagtaagagtttagtaagtattatatttgtttaattagtgtttgtttattaggtttaatttttggttttatatgtttagtaatattttttaatttgtttatttttgtttttttttgggttttgttgtttattttgttttttgaaataaggagttttttttagtattgtagttgataaggttagagtttaaagtagttagggattttaagaggtattttagtttggtttttggtttagataaaatattattttttattgtagaagtagtaattgaatttaggaaaggttgagtgatttgagagattatagtaggtataggtggggatattggttaatttttagtttttttgatttaggagtatttaggtcgtggatatagagtgtttttttttttaaagtggagttttatagtgtattatttatagttattttagttgttggtggtatttggaggagtattttaaatatttttttttttaaattataggtttagttgggattaggaatattaatttatattatatgagtagaatttgtttatttggggatatttttaataatgttaaaatttatgttttagatgagtaagagtatgaattggaattatttttagggaattttttgtttgtattttattttgtttttatttatttatttatttatttatttatttatttatttatttattatttttgagatagagttttattttgttgtttaggttggagtgtaatggtgttattttagtttattgtaatttttgtttttttggttttagtgatttttttgttttagttttttaagtagttgggattataggtacgtgttattacgtttggttagtttttgtatttttagtagagacggagttttattatgttgattaggttggttttgaatttttgattttaagtgatttatttattttggttttttaaagtgttgggattataggcgtgaaatattacgtttcgtttgtatattattttgggtggttgaattttttatttttttggtttttttttttgtgttggtaggaggggaggttgggagagaatgggagaggtggttatgattagtaaagagataattggagggagatggtttaattttgtggttttggattttgaagtggtttttattgaaaatagtagatttttaggtttagaatagtggtaaaatagtttggaatttaggggtttttgattttttttagatttttttaagttggagtgtagtggtgtgattttagtttattgtaatttttgtttttcgggtttaagtgatttttttattttagttttttgagtagttgggattataggtgtatgttattatatttagttaatttttgtagttttggtagagatttttttgttttgtttaagttggttttgattttttgggattaagtaatttgtttgttttagttttttaaaatgttgggattgtaggtgtgagttatcgtattttgttttatatattttgtttcgtaataagtttattttaaattaagatcgaaggttaggtacggtggtttatatttataattttaaaagtgtgattttagaatataaaatttgggattataatttgtaattttaaaagtgggatttgggtatgggttattatattcggttgatttttttttttttttttttttttgatagagataggttttatattatattgtttaggttggtttcgaattttttgattgaagcgatttatttgttttggtttgataaagtgttgagattatagatgtgttttgtttgatttgattattgttttttatattttttttaatgtataggttagtttttttatttttttttttttttgaaataggtttgttggagaaaatggattttttttgtattgtatagttttttagtttgggttttgttgattttattttggaggtgttatgtaagatatttttttgatcgttgattttttgtgaattgttaattttatttagaggtttgattagattgaagtttagtgtttgtttttgtagggtttttttttagggaatgttgtgaatatttatttagaggtatatgttgtttgtttgtgttcgttttttttggtgatgttttaagttattcgtgattatcgattaatttattattttattaggagttgtaaaatagtaatattggaattttattatttttttttttatttatgtatttattttttttttttttttatatttatttttttgttttgttcgtttttttttttagttattaggtagattgtttgtgtaagagaaattgttttattaattatggggtttagttatggtttttataggaaaggtagaataaaggatttttttttattattagtttttaagttgttgagttggttacgtagagttttttataagtgattaattatttaagatattattatgaaattatggattgaaatatatttgatgtattttagtttattatagtttattatagtgattagttttatgaatgtttaaattgtttcgtttttggtaagtgggagtttttttatttttttttgatatagtttaaagagattttgatagttttttgagtttttgatttgattagatatcgaagtatattttgtatattttcgtttttagtttgagagttaagtatttttttaagaagatttgattttagttgaagggaaatgatagattgttagagatgtttgttgttgttggattggtttttgtttttagggttttttagtgggaagaaaatataaatatattttaaaaataaatttattgtttgtttatattaatattttttttatttttttaaaattttttttattagttttaggattaaggaaaaagatattttttatttaaatagaggtttttagtgtttttatataattttatatatttgtatttgttttttttttttaattaaatattttagtttttaaatttattaacgtttgttttattttttaatatttatatatagttttaaaataataatattaatattatcgttattaatatgataatgtttttttatgaaagggttatatatgtaaagtggtttttaaaggttaaaggagttgagaaattaaagaataaggtaggtaagtttagtttgttgttaaagcgtgttttattggggaatttatagacggaagtttgtttttgggtagttgtaagataggtggattttatattgttattttagatttaaggtttatttatatattatagggaaagagtatatgtgtttagtgtaagataaaggtaattgtttagaataggttagaatgttatgtgcgttatagtttataatttgtgtgataatattaaagttgatatatttttatattagggatagtaaataaagtaggaattaggaggcgtttttgggattggggttaattagatgacgatatggtggattagtatttaagatggggttatttttgtttttataataaaattatttttttagtttttttttttttgtttttagggtatattttattaggaatatataattaaattgtagtggtttaaagttgtttgagatagtttttttttttgtaattgtattattaatttattgtgcggatagttttttatttttgtttttgatttttagaaatttaaatatatatatgtatatatttttagatatagagtagtatttagatttttttattttttttttttttaaatgaatattgggataaaattgatatatagtttgatttttttttatttaataataggtgttgttaattagtttatggtagtatgtagagatatttattttttttttaatgttttatagtattttatatttaatttagttagttttttgttgttagatatttgggttatttttagtatttatttatttatttatttttaaaatttgaaatagagatggagttttattatgttgtttaggttggttttgaatttttgggtttaagtaaatagttcgttttggttttttaaaaagtgttaggattatagttattatgttcggtttatttttagttttttgttatgataaatagagttgtaataaatagtttatataaatatttttttatatttttgttagtgatgttttggaatagttttttagaaattgtattgttggaaatgtatatgtaattttgttagatatagttagttaaatttttttttatagagattgttttattttgtatttttagttataatgtattagaatgtttatttttttatagttttgttaattatatgtattgataaatttttggattttttgtcgatttgataggtataatatgttattttaggatagttgttttgtttcgtttgttttgttttttgtttttgtttttgttttgttttttgtttttttgcgatttttttgttttagttttttgagtagttgggattataagtgagcgttattatgtttgattaatttttgtatttttagtagagacggggttttattatattggttaggttggttttgaattttcgattttatgatttattttttttggttttttaaagtgttgggattataggtatgagttattatgtttagttaaaatttattattttttttttttaattgtagttgaagatttagttatagttatgtaagttttttttatttttaagttgtagaagaatttatttttttttaatattgtgtggtttttgttttttaaagttttatatggaatttatttttttgtatgtatgttatgataagtggattaatttttatttttttttatatagagttttaaatttgatattattagttttttttttttattttttttttttagtttgattttttttggatattttattatttttttggttaaagttggatatggattaaaataaacgtttgtttaattttttgtgtttggttttattttgttgtttgttttttttttttggattttttgtgattttagtatagtgtttttttagttatttaaggagttatgatttttagggtttgaggaagagtgtattaaaggtttgtttagagaatgatttaagttggagtggattttgtagacgtttaggagggtttagttttatttgggttagggggttggagagttgttttttaggagtaggatagttatttacgcgtgtgaagtatttaggagtttagttttttgtgtttttgttttttttttgagacggagttttattgtgtcgtttgggttggagtgtagtggtgtgatttcggtttattgtaatttttgttttttgggtttaagtgatttttttgttttagttttttgagtagttgggattataggcgttcgttattatatttagttaatttttatttttagtagagacggggttttattatgttggttaggttggtttcgaatttttgattttaggtgatttgtttagtagttttttaacgtgttgggattataggcgtgaattacggcgtttgttttggagtttagtttttgttgataatttatgttttttgtttttattttttttttgtttttgatttttattaggaatttttatttttttaattggaaaagattggggttagggggtggagaagtgggtagaggaagggaggagtggaatatagaaattgaaatttgttttattttgtttatgtaatttttagcgtagatttatattattaatgttaattattatttagtggttattttttattattacgtattagatattgcgttaagtattttatatagaataaattattttattttgatttgttagttggttagggtggttatttttagaaggaaaaagaggtttagagataagtttatataattggtaagtagtgggatttgggtttgtgtgatattagattttaggtttaaaacgtttaagtttgtggttttcgtaaaaaaggtttataatagtttgtatttttgtttgtttttttatttaaagattaattttattttattttattgtttagatttgttgagtttagatgtgagtagtgtgtttggttgtgattgtaggtattatgttaggttgtagggattcgtggttggagaggggtttcgttttgtttttcgtttgttttgttgttagtatagtgtttggtatacgtgggtttttattacgtatttgttggataattagatgaaaaaggaggaggaagaggaacgtgtgttggagataaagcggtaggagtggaggaggcgtaggggaagagaatagatttgggaaaaattagtgggatatgaggatgttgggtaggtgggtagaaggttgttatgtgtttagaagtatagaaaaagggtgatttttaggttaaaagtgattttaggatgggtgtgatggtttatgtttgtaattttagtattttgggaagttgtcggacggattatttgaggttaggagttatagatttgtttggttaatatggtaaaattttgtttttattgaaaatataaaaattagtaggtgtggtggtaggtatttgtaattttagttattcgggagggttgaggtagaagaatcgtttgaatttagtaggtgaaggttgtagtgagttaagattgcgttattgtattttagtttaggcggtagagtaagattgttttaaaaaaaaaaaaaaaaaaaaaaaaatatatatatatatatatatatatatatatatataaatatatatatatatatatatatatatatatatatatatatatatgtatatatatatatatatatatatatatatatatatataaagtgattttagtttttttataatttgattattgagtaagtgatttagattgtggttattttttgttaatttttatttgatttaattagaaagtaaagtaaaataaaaatttgattgttttttatagataagttaatgtgaaggtatttagtttatataggttgtaaaagatagagaaatatttaagttattttaggggatggatattttttaaggatatataggtgagtaaggaaaataggaaatggtttttgtaggttttaagaattagagtattatttaggatgcgatggttatatatagtgtggtttggtagagaggaggaaattgttttttattattaagaatatagttttaggtcgggtgtggttgtttacgtttgtaattttagtattttgggaggttgaggagggtggattatttgaggttaggagttcgggattagtttggttaaaatggtgaaatttcgtttttattaaaaataaaaataaaaaattattcgggcgtagtggcgtatgtttatagatttagttattgaggaggttgaggtaggagaattgtttgaatttaggaggcggaggttgtagtgagttgaggttgtgttattgtattttagtttgggtgataagagtaaaattttgttttaaaaataaagataaaaataaaagtcgggttttgtggttaatatttgtaattttagtattttgggaggtcggggtggatagattacgaggttaagagatcgagattattttggttaatatggtgaaattttgtttttattaaaaatataaaaattagttgggtatggtagcgcgtgtttgtagttttagttatttaggaggttgatgtaggagaatcgtttgaattcgggaggcggaggttgtagtaagtcgagattatgttattgtattttagtttggtaatagagtaagattttattttaaaataaaataataataataataaattaaaaaagaaaatatagaaatttggttgggtgtagtggtttatgtttgtaatttttgtattttgggaggttaaggtgggcggattatttgaggttaggagttcgagattagtttggttaatatggtgaaattttgtttgtattaaaaatataaaaaaaattagttaggtttggtggtaggtgtttgtaattttagttatttaggaggttgaggtaggagaattgtttgaatttggaaggtggaggttgtagtgagttgagattacgttattgtattttagtttgggtaatagagtaagattttattttaaaataaataaataaataaataaataaaagaatatagtttttttagtttttagtttttttggggtttttgtgtgaaagaaaatattttaatgtgttttttgattatatgaaatttaggtagagtttgattaaagagatgttttattgttgagtatagtgaagagaaaggatgttttttttgagtagagaggtggtgagaaatttttagaatagggtattttgtatggagattattttaggaatgttatttttggtatggaattttatttgttttttgtagaattttgggttggtttatttatggtttaagtttttattgaagttgtgttgatttttagtttagtgttagttggtaaaggaagggaagggttgaaggagttggatttttatagggaggtgttgaaagaaaggagaagtaagaggtgatattgattagggaaatggcgttattttttgagttagggttttggattttttgtagttgtagaaaagtgtaggtttgagttatttaattattaaagaaaaagtggtgttttgtgtgtgggaaaaataatatttaatgtgtttttttttatttttttatttataataattattaatatagaaggtttttgtgattaaatgtgaggagttttgtttttatatattaagtaagtaattaaatttgtagtagatattagttgggtgttttttaatttaattttgatattgtttatttagaggtagtattagattttataggttgagggtttagtttttaagattgtttttcgatttatattggttataggtttggttttgggaatttttgatttattagttttaagttgggatttttataattttttttttgggtttagttaaatgaatatttgtatttattggtttattataaaggttagagatgaagagatgtatagggagaaggggtatagagttttcgagttttttttgtgtgtaatattttttaggaatttttatgtgtttagttttttagaagttttttgaatttcgtttttttgggtatttatggagattttattggataggtatgattgaagtatggataattatgttaaaatgtgattgaataaaaaggatatgatttaatattaatagatagattggggaaatttagtgagttttgtttagattttttttggtttttttgtgtagtttttttttttttaggatatggggtattttttttgaaatgggagttttatgatttatagttagataaggtaggttaaagatagaaagatgggtaaagatttttgttttggagagataaaggagtagatgaaatgagggtaggagaaggttagagagatttcgtttattgagatttgtttttgaggtttaaagtatttaatattataataatagatggtaataagggtaatgggaattataagttaggaattatggattaaaatttatatataaattataatagtatagaattttaaaggttggaaaatttgtgggttttttttttattatatagagttattgttttttttatagtgtttgtatatttttgtttttttttgttgaatgattttttttttgatatagttttattttgttgtttaggttggagtgtagtggtgtgattttggtttattgtaatttttattttttgggtttaagagatttttttgttttaattttttaagtagttgggattataagtttttgttattacgttcgtttaattttttgtatttttgtagagatagggttttattatgttggttagtttggttttgaatttttgattttaagcgatttatttattttggttttttaaagtgttgggattataggcgtgagttattgtgtcgagtttgtagaatgattttaaatttttattttttatttatagtagtttatttttttttttttttttaaatttttttttttttatttttttttttattttttttgtttttttagaagtagaaaagggtatattttttttgtgatattttttttttttattatgaaagtttcggttacggttttttaataaaagataggttaatgagagaaaaatatttattgaatttaagttttatgtgttacggtggtttttagaatgaagatttataggggtcggatgtggcggtttatgtttgtaattttagtagtttgggaggtcgaggtgggtagattatttgaggttaggagtttaagattagtttgtttaatatggtaagattttgtttttattaaaaaaaaaaaaaatttagttgggtgtggtggtatgtatttgtagttttagttatttatgaggttgaggtaggagaattgtttgaatataggaggtagaggttgtagtgagttgagattatattgttatattttagtttgggcgatagagtaagatttcgttttaaaaaaaaaaaaaaaaaaaaggaaaaagaaaagaattaagatttatagggaaaatttttattttttatgtttagagttgatgaagaatggatggttatgtggaaatattatgggatagaaagggtatgattttttggaggaatttagtaatgtttgtttgttcggatttttttcggtttttatgttgtagtatttttgttagttaggtatgggattggatttttttggaatgaggattttattgtgtttagaaatggtgggtttttggttttattgattttaagaacgaagttatagattttcgcggtgagtgttatagtttttaaggtggcgtttttggagtttgttttttttgatgtttagatgtgttcggagttttttttttttggtaggtttatggttttgttggtttaggagtgaagttgtagattttcgtagtaagtgttataatttataaaagtagtatggatttaaaaaagtgaatagtagtaagatttattgtaaagagtaaaagaataaattttttatagtttggaaagggatttaagcgggttgttaatgttggttcgggtagtttgtttttatttttttatttggttttatttatattttgttgattggtagagtcgagtggtttgttttgttagggtgttgattggtgcgtttataatttttgcgttagatataaaggttttttacgtttttattagattagttagatatagagtttggatatataggttttttaaggttttattagagtaattagatatagagtgtggattggtgtatttataagttttgagttaaatatagggtgttgattggtgtatttataatttttgagttagatataaagattttttatatttttattagatttaggagtttagttggttttatttagtggattttatattggggttgtaggtggagttgtttgttagttttgtgtcgtgtgtttgtattttttagtttttgggtggtcgatgggattgggcgtcgtggagtagggggtggtgttcgtcggggaggttcgggcggtataggagttttttgagtgggtgggaggtttaggtatggcgggttgtaggtttcgagttttgtttcgcgggaaggtagttaaggttcggtgagaaatcgagcgtatcgtcggtgggttggtattgttgggcgatttagtatattttttgtagttattggttcgggtgttaagttttttattgttcggggtcggtagggttggtcggttgttttgagtgcggggttttttaagtttacgtttattcggaattttcgttggcgtttaagcgtcgttcgtagtttcggttttcgttcgtatttttttttttatatttttttgtaagttgagggagtgggttttagttttggttagtttagaaaggggtttttatagtgtagtggtgggttgaagggttcgttaaatgtcgttaaagtgggagtttaggtagaggaggtggtaagagtaagcgagggttttgaggattgttagtacgttgttattttttattatggtttattattagataagcgtaggttagattatttatttatggttatgttttaggaagtagtagaagaaataattttagtttttatggttggttttggggaataggggttttggtttttatgattttagggaggattaattttggtttttgtggtttattttaggagagaatgaggggcgagagataggaggggtagaaggttagagggattttggtttcgaggttgtttttgagtttttttaatgttttttagtttaaagtatttagtatgttaaagtgttatattttggggtattgttttttgagttttagtgtttttttttttttttttttatttttttttaattttttttttttttttttttaattgagatggagttttattttattatttaggttggagtgtagtggcgtaattttcgtttattgtaattttcgtcgtcgttcgggtttaagtgattttcgtgttttagttttttaagtagttgggattataggtatatgttattatgtttggttttttttttttatttttagtagagatggggttttgttatgttggttaggttggtttcgaatttttgattttaggtgattcgtttgttttggttttacgtttgttgggattataggcgtgagttattgtattcggtttttaatttttttttaatcgtatttattaatattttttttttttttttttttattttattattttgggtttttttttgttcgttttttagttttttttattgttagttagttttttgttttttttttttttttttttgtaatagttttttatgttatttgtttagtataatagaagtgtaaatcgatggtttattgtttgagtatttgttttgtagaaatatataatttgttaagagaacgtttatttaaaatattgtttttaggaattgggagtagtggtttatgcgtgtaattttagtattttgggaggtcgagttgggaggattgtttgagtttaggagtttgggattagtttgggtaatatagtaggatttcgtttttataaaaaatataaaaattagttaggtatgatgttatatatttgtagtttgtagttagtttttggggaggttgagttgggaggattgtttgagtttaggaggttaaggttgtagaaaattttgattgtgttattgtattttagtttgggtgatagagtaagattttggttttaaaaaaaaagaagaaaaaaagtttttaattttaataattaagaattggagattttatataaaaatttagattttattttgggtaatatgggtaatatagtgagattttgtttttataaaaaataataaaaattagttgggtgtggtggtttatatttataatttaatttgagaggttgaggagggaggattgttttagtttaggagttttaggttgtagtgttttatgatagtgttattgtattttagattggggtgagattcggtttttaaatagaaattttagttttatagtttaaaaaaaaattaggttatttggtattatgcgatttatatcgattgttagtaatagttgatggagttgggcggtggttgttttattttgtttattagtgtttattttatgttttttggtttttttaatattgagggaaagtgttaattggtatttattatttagtttgagtagttatttttttttttagtagataaattttagtttttatttatatttttattgaaaaaagggaaaatagagaataagagttaggttttttttattttaagtttgttattttatttgtattttttgttttgtttttgtaggtggttgaatttttaattttcgttatagataaaggtttaggtttttttttttaattttttatcgtgttttattttttttttattttttttatatattttcgtttttttttttgtttatataaggttaatatttaggtcgggtatagtggtttacgtttgtaattttagtattttgggaggttaaagcgggtggattatttgaggttaggagttcgagattagtttggttaatatggtgaaatattatttttattaaaaatataaaaatattagttaggtatggtggtgtatgtttgtaattttagttatttgggaggttgaggtagtagaattatttgaattcgggagataggagttgtagtgagtcgagatggtattattgtattttagtttgggtgacggagtgagattttattttaaaaaaaaaaaaaagttaatatttaatgtattgatgtaaagttaattttaggattatttttgaaatttttttttagattgttttgaaatttttaatttttagaaaaagtttgtgaaaaattattttattttcgtattagtgtgtgtgtttgtgtgtgtgtgtacgtatatagatgagagtagttattttgtgaaggatttgttatttattttgttattttttttgtttgattaatagtttatttatatggataagatttgagaatcggttattaggtcgtatgaaagaggagttttttttaggattattattagtataggtttggtatttatttaattagtaatagaaatttgaaaaatagtggtataaaaaattgagagtttaatttttttgtatttagaataaatttagaggtgagagtagggattttaatagtatagtaatattggtaagaatttagtgtaattaattatgttttttagtttttatattttgatatttttatatcgtggggttttgttgattttggagtgattgttttttttaggttgagttaatttttagaagtaaagaattcgtttgttatatgtagattaattaagttagattttatttttttaattattatttttattaggttttgttatttttagttgtaatttttttagttagtttaggattagtattagagagttagggatagtttttatgttttagaggttgttgaaattatttaaattagtcgagtttgaatttgtttatttgtttgtatatttttgtttgtgaaattataataaaggtttttgtttatattttttttttatttttattgttttttgattgatttaggtgtttttttatggggtatttttgtacgttatgttatgttttatgtatgtttttagggaattgtgagtaaatgtttttttttatgaaagtgatttttgtgtttgtacgttttgttatatttgattaaaataaattttggttatttttataatttttaggtttatttagttttttgagttattattttgatttgatcgagtattaggaattttatttttgggcggggtgtagtggtttacgtttataatttttatattttgggaagttaaggttggtagattatttgaggttaggagtttgagattagttcggttaatatagtgaaattttgtttttattaaaaaaaaaaaaagaaaaaaaaaatagttgggtgtagtggtatatttttgtaattttagttatttgggaggttgaggtacgaaaattatttgaatttggaggtggaggttgtagtgagtcgagaatgtgtttttgtattttagtttgggtgatagagtgagattttgttttaaaataaataaataaataaataaaaataaaaagaattttatttttgggtggtgtggtggtttatatttataattttagttttttgtgaggttaggataggaagattatttgaggttaggagtttgagattagtttggggaatgtagtaagatttcgtttttataaaaataaaaaataaaaaaaaaattagttagatgtagtggtatatatttgtagttttagttatttaggaggttgtggtaggaggattatttgagtttaggtgtttgaggttatagtgagttatgatcgtattattgtattttagtgtgggtaatagaaggagatggagtgagagtgtttttaaagataataagaattttattttttaatttattttttttaatatttattatattttgaaatattatatatttgtttgtttataatttgtttttttttattagattgtaagttttttgaagttagagatttttatttgttttttttatggtaagtttttagaattgaaaatagggtttggtatgtatttattgaaaaagtgattaagtgttttttagttgatggttggagtttagattattatggttttgttttaggttggaggaagtgggagagtaaaaggtaaagggggtttatgttagttgagttagttttagaaaagaatttttttgaaagttttttttatatgatttaggttaatattttattggttagttttatgttatattattatttttatttgtatggtagtttgaggtaaaaaaaaatttaaagtatagaattttgttaaataaaataaaattggggttttgttagaagaaggaagggataatgaatattgggtttttgtaagggggttgttggttgtattttaaatgttcgtagtattatatacgaattatatatggagttttttttttttttttttttgaggtggagttttattttgttgtttaagttggagtatagtggtgtgatttcggtttattgtaagttttattttttggatttatattatttttttgttttagtttttcgagtagttgggattataggcgtttattattttcggttaatttttgtatttttagtagagacggggttttattatgttagttaggatggtttcgattttatgattttgtgattcgttcgtttcggttttttaaagtgttgggatcgtaggcgtgagttatcgcgtttagttttatatggagttttttattttggtttgtgtttttttttttatttattttttttttttttttttttttgagagggagttttgttttgtcgtttaggttggagtgtagtggtgtgattttggtttattgtaatttttgttttttgggtttaagcgatttttttgttttagttttttatgtagttgggattgtaggtgtttgttattatatttagttaatttttgtatttttagtagagaatagggttttattatgttggttaggttggttttaaattttttattttaagtgatttgttcgttttggttttttaaagtgttagaattataggcgtgaagttattacgttcggttttttttttatttatttttgtgagtaatattagtttttttgaattttattaaatttaattttttaattttatattaattgtttatttgttgagtttttaagatgtaattgtatataattttaggaattgtgagtagtaagaatttttttattagttgttttatttttagatattatgatttttattgaaatatttagtggtttaagttttgtttagtatgtttttgattttgtgtgtttgtggggtgtgtgtgtgtggtgtgtgtgtgtgtatgtgtatatagttatgtgtatttttatattatataaggggaagataaagggagatttttcgtggttttttttttttttttttaaggttgatgttggttttttttgaaaatgttttaatgtgtagaaagtagtttatagataggtattttttgtgataaagtagttatagttaaagtagggttttttttattttagttttttaagtagttgagattataggtgtattattacgtttaggtaagtttaaaaaaaaaagttttgtagagatgggggttttattatgttgtttaggtcgattttaaatttttggttttaagtgatttttttattttggttttttaaagtgttgggattatagatacgagttattatatttagttgagaatttttttatggttattttttggataaaaagttaaggagagtttagagtaataattttagtttttatggtttttgtttcggggaaaaagggttttagtttttaggatttatcgtggggaagaggattttggtttttatgatttattttaggggagaacgagggataagagagataggagggtaggagtaggttagagggattttggatttgaggttgtttttgaggttttttaatgttttttagttaagtatttatcgttatattttggggtattgtgttttgaattttaatagaaataatttattttttcggtattagttttgtgtttatatttataggagtaggagtataagttattgtaggtgcgggttttttagatggagtaattttaatgttatttgttttttatttgtatttagtggatttttttggtagttttttttattttttcgtgtggttttatatttttatattttttgtggtagacgtagtttgttgtttttttaaattttatcgttttttttttttttaattatggaaatttgattttgtttgtggtatttatgtgtttttttgaaatatttatttttttagattgttttgaatttaggggtggttatatgattgggtaatgagttatcggtagaagtcggtttgatggggtttttagggaaataacggtttttttgtttttgttttttttttttttttttttaaatttttttttgttatttttttttttgtttgtttttaagatggatttgttcggaatatattttttgtttttttttttttttttttgtttggaatgtaaatgtgatgtttgaaggtagagtaattattttgtatatgtgatatagaaaggtagatgtgaagatatttagtaggagattgtatttttggtgattggagtagttgtattagttttggattgtttgtttaagttttttttataattgggaaaaataaatatttatgaagttaggttattgtattgagtttttgttatttaagaattaaatataatatttattgagatggtattttatttttattgtttaggtttgtgtgtggtggtttgattttagtttattataatttttattttttatttagttttgttttaggtttaagcgatttttttgttttagttttttgagtagttgagattataggcgtttattacgtttggttaatttttttgtatttttagtggagacggggttttataatgttggttaggttggttttgaatttttgattttaggtgatttattttttttagttttttaaagtgttggaattataaaggtgagttacggtattcggtttttttttttttttgagatagtttcgttttgttgttaggttgggatgtagtgtggtgtgattttagtttgtgttcggaattggtgggtttttggttttattgattttaagaatgaagttacggatttttacggtgagtgttatagtttttaaggtggtatgtttggagtttgttttttttgatgtttagatgtgttcggagttttttttttttggtgggtttgtggttttattggttttaggaatgaagttgtagatttttgtagtgagtgttatagtttataaaagtaatgtagatttaaagattgagtagtagtaagatttattgtaaagagtaaaagaataaagtttatatattggggaaggggatcggagtaagttgttattgttggttggggtagtttgtttttatttttttatttggttatatttatattttgttgattggtagagtcgagtggtttgttttgatagggtgttgattggtgcgtttataatttttgagttatatataaaggttttttacgtttttattagattagttagatatagagtatggatatacgggttttttaaggttttattagagtagttagatatagagtgtcgattggtgtatttataaattttgagttagatatagggtgttgattggcgtgtttataaattttgagttagatatagagtgtcgattggtgtatttataatttttgagttaaatgtaaaggttttttaaggttttattagagtagttagatatagagtgtcgattggtgtatttataaattttgagttagatatagggtgttgattggcgtgtttataaattttgagttagatatagagtgtcgattggtgtatttataatttttgagttagatataaaggttttttaagggtttattagagtagttaggtagagtgttaattggggtatttataaattttgagttagatatagggtgttgattggtgtgtttataaattttgagttagatatagagtgtcgattggtgtatttataatttttgagttagatataaagattttttacgtttttattagatttaggagtttagttggttttatttagtggatttagtatcggggttgtaggtggagttgtttgttagttttgggttatgcgtttatattttttagtttttgggcggtcgatgggattgggggttttggagtagggggcggcgttcgtcggggaggtttgggtcgtataggagtttacggagggggtgggaggtttaggtatggcgggttgtaggtttcgagttttgtttcgtgcgaaggtagttaaggtttggcgagaaatcgagcgtatcgtcggtgggtcggtattgttgggggatttagtatatttttcgtagtcgttggttcgggtgttaagttttttattgtttgcggttggtagggtcggtcggttgtttcgagtgcggggttcgttaagtttacgtttattcggaattttagttggttcgtaagtattgtacgtagtttcggtttcgttcgcgtttttttttttatatttttttgtaagttgagggagtcggttttggttttggttagtttagaaaggggtttttatagtgtagcggtgggttgaagggttttttaaatgtcgttaaagtgggagtttaggtagaggaggcgtttagagcgagtgagagttgtgaggattgttagtaggttgttattttttaagtttattgtaatttttgttttttaggtttaagtgatttttttgttttagttttttgagtaggtaggattataggcgtgtgttattatattcggttaatttttgtatttttagtggagatagggttttattatgttcgttaggttggttttaaatttttgattttaggtgatttatttattttggttttttaaaatgttgggattataggtattagttattgtttttggtttttgtgtagttttgtttggagttgtagtaaatagtgtttaattttttttttttttataggttatttttttatattgttttttagatataaaatttataaatgtatataagttatatttatgttatttatttttttaggttttgttaaggttttgagaaattagatttagattgtgtttttatgtagggggattgtatatagtatttttgaattttagtttttttttttgtaaaatggggaattttgattatttagtatgcgttatgtgttaaaattttaatttcgttagtaattataattattattagtattttatattttggtttttttagggtttttttaaggtaaatgggaagatttgttgttaagtttatttcgggaggttattaggtttagaatatttttgtttttataaatttttattttttttatttaagaataaggattagagtgtttttatttaattataattgggataggtgggagggagttatttatgtgggtaatattagggaaattttttttttgagatagggttttgttttgttgtttaggttggagtatagtggtgtgattatggtttattgtagtttcgattttttgggtttaagtaatttttttgttttagttttttaagttttgatagtttttagggattataggcgtatattattatattttatttatttttgtattttttgtggagatgcgttttttttatgttttttaggttggttttgaatttttgggtttaagagatttttagggaaatattttattaaattagaagtgatggattaatttttagtaagtttttagtgggtattgttttttttagggagttggatagaagaggggtttcggagttataatattcgtgttgtttatgatggtagaaaagggaagtttaaaaagagtttgggtttgaattggggtttaggaaaagttaatggggtagtgattttggttttttttatttatttttttgtaataatattattttaataatttggttgggtatgtggtttatatttataattttagtattttgggaggttaaggtgaatggattatttgaggttaggagtttaagattagattggttaatatggtgaaattttgtttttattaaaaatataaaaattattcggtcgaggtggtggttgtttgtaatttaagttattcgggaggttgaggtaggagaatcgtttgaatttgggaggcggaggttgtagtgagttgagattgcgttattattttttagtttgggtgatagagggagattttttttttaaagaaaaaatttaatcgttttttttaaaaaaaattaattaaataaaaaattaattttatttttatgacgttgtttttttttagttttttagggtatttttgtagttttaatatttggttttagttataagaaaatttttttattattattttttgtttattgtgtaattttttgaagatatttttttgatggtatttttttttttttattttttgtgtgttattattattttttgtttatttttgttttgtgtttattttttgaaatttgatttattttttaggtttattttagaagtttttatgaagttagtttgtacggagatattttttttttttggaatttatggtatttagttgttatggtttttgtgtttattagtaaattggaatgcgtttttattagatttatttttttattttagattttttaaggtaggaattgttttgtatttagttttgtttttgttatgttgtatttatttgataattattttttgaatttaattggaaatttcggtttggaaggagaggatatatatatacgaagtatggtatatttaaataaattggagttaatttttttttagaaatattttttatttaagtttttgttatataggtataggtttggaaataaaaggtgtggttaaaagttatttgtttagagaattttttttttgttgttgttgttttgagatggagtttcgttttgtcgttaggtcggagtgtagtggcgtaattttggtttattgtaattttcgtttttcgggtttaagcgatttttttgttttagtttttcgagtagttgggattatagatatgcgttattacgttcggttaaatttttgtgttttaatagagacggggttttattttgttggttaggttggttttaattttttgatttcgtgattcgttcgtttcggttttttaaagtattgggattataggcgtgagttatcgtgtttagtttagataatttttttttttagattttttttatagattttttaagttgtaaaataaatgaatattattttttattatttatatttaggaagtgttgagtaatttttttttgtggatttattgagttagaggtttatatttggttgggtaagtagtgggtgtgattagtgatgaatattttttggttttagtattagtattagttatttatatgttagtgatgtaaatttttatatgtagagtttttgatattgttcggagtgtttttatatttatgtttaaattggatttagcgggggtggttgtcgagaaaagaaatttgatagagtaggtttaaagggtttttggttttttgtattggaagaattagggtgggaatatagtgggagaagagaggtggaatgttatagttttgatagtttttagtatggagatagttagtagttaattagatatgggaatcggaagtttagtagagaggatagttggagagtatattttaaagttattgttatataaataggaattaaaattttgatagtgggtgggatcgtttgggagagtacggaggaagaggaggatggatttagaatggagttttagtgtttgggtagtgtatggaggataggatttttgaataggtcggtaaagtgtgggtagagaggttaaggagagagaggagaagttattgtagaaatcgataattttaataaatgagagagaggttagttgtaaggtaagaattaagaagggtttattggatttggcgtggagtaaagggatggagtgagtggagtaaaagcgaagatggaaggtggattttagtggtgttagaggggaatggtagtaaggagagcgtagtggatatggagatgtgttgtttagattttttttaaggaaggatttgttgtttagttatgggagagtagttagtagatagtttttagttattagtttttttagggttttttggttgtaaagagttgtttggtttttttttttggttatatttttttttttggtagttttatgtggtgattaagtagggttggatataaatgtttggtttttttagtttaatttgttttgttttgatagataatattgttttaagttttttgtagagttatgagaggtgtggttgggtttgtagtttagtttaatttttttttttgtttatttttgtttttttgtttttatttataggtgttaatatttaattaatattttgtattttaattttattttagtatttgtttttagagaatatggtttttaatagaattatgggaataagttttttgaagagtttgagagtaggagtcgagggacgggaaggaggtgttaaaaaattagtagggaatggtgatacgtttatagttttagttattgggaggttaaggtgaaaggattatttgagtttaggggtgattatatttagtttttttcggggtttacgaaatattttataaaatatttttttgtattttatttgagggtttttgtttatagttattgttaaggttatttatttgtagttttttttttttttttatttttgagatagagtttcgttttgttatttaggttggagtatagtggtttgattttggtttattgtaagttttgattttttgggtttaagtgatttttttgttttagttttttaagtagttgggattataggtgtgtattattatatttggttaattttttttttttttttgagatggagtttttgtttttgttgtttaggttggagtgtgatggtacgatttcggtttattgtagattttattatttaggtttaagtaatttttttgttttagtttttcgagtagttgggattataggtatgcgttattatatttggttaattttgtatttttagtagagatagggtttttttatgttggttaggttggtttcgaattgttgattttaggtgatatgtttgtcgcggttttttaaagtgttgggattataggcgtgagttatcgtgtttagttaatttttgtattttttgtagagatggggttttgtttaggtttattttaaatttttgaatttaagtaatttatttgttttagttttttaaagtgttaggattataggcgtgagtttttatatttggtttgatttgtgttttttaatatttatttttttttttatttttgggaattagagttatataatttttaatttttaatatttttttgtttttttgtgattttttagagatcgttgatagtgatttggagatatttttagttaatttttattttggtatttaggaatgtaatttatttagattaggaggtttgaatatatttggagtagttatttttgttgttattattattttttttaggtgttatggtgatttttatttagtagtggtcgttttgttgttttttagttaaattttatgttgtttattgataagttgggggtattggtttttgtttttgtttttttttttggaaatattattttgtttttttggatatgggtaagggttttgtttttaatttgttttttttttttttttgattttaattagttttatttgtattaagattaaatttttttatttttttatgtagggaaataggtattattaagattaatgttttggtattttttatgtagtgagtgatagatgtttacggaaaatggggagaaaattaaggggtgaaagggaataattttaaaaaggatacgtttatattttttgatagtatagttgtatgtttttaatttattttggttattagatggtataattgggtttattaagataaataaagagaatggttattattttgaaaaaataaaaaaaaaattttagataattaatggtgaaaatgtttttgagaaagtttatttttaatttttatttttagttggttttttatatataggtaggggagatttatttttggaattttaaggtttaaaaaggaatttgtttgtatttgatggttagaaaattatattgaaatcgttaattggtatttagaattgtttgttttaagagttagaaatgagcgtgtttttatttgtttttagtatatatttttttttgaggtaaattttttattgttgagtttttgaatttcggagtggatgaagagggtgatgagggattgtagttaatattagtattgttgagttaaaatattattatattttgttaggagaagtgttgattgttttgtggaatttgaggatgagtggtattggtttttaaggattagtttgtttttttcggttatttttgaatatgatttggaatttgtggggtttgggttatgataagaagggaattgagaaagtaaaaatatttattgtttgttttgtgtttttatatatttttgattttgggagattttaaaggtttatttttaatatttgttttaggtgtatagatttgtttatttaataagtattttaggtattatataggggttgggaagaaagagtaaataaggtagagttttaatttttaaagagttttttaattttggtttttagttttataggggtaagatgggaatgttatgagaggttttttgattgtggtttaagggaatatttagtgtttagatgtgtgaagtgggatgtagtttttggtgaaggtagaagttttttaaaagtttattgattgtaaagaataaattaaaatgggtcgggtgtagtggtttacgtttgtaattatagtattttgagaggttaaggtaggcggtttatgaggttaggagtttaagattagtttggttaatatggtgaaatttcgtttttattaaaaatataaaaattagttgggtatggtggcgggtgtttgtaattttagttatttgggaggttgaggtaggagaatcgtttgaattcgggaggtagaggttgtagcgagtcgagatggtattattgtattttagtttgagtgatagagtaagattttattttaaaaaaaaaaaaagaataaattaaaatgataaagttttttgataatattttagtttattttttttttttttttttttatttttttttttttttttttttttttttttttttttttttttttttttttttttttttttttttttttttttttggagatggagttttgtttttttgtttaggttggagtgtagtggtgtgagttatttcgtttagttattttagtttattttttatataagaaatattgagggtttattaaagaaagaaagagatagtagaataatgggaattacgttgtaaaaatgtaaatcgtttattggtgattgttaggattttgatgatttaataaaatgattggtatatgaggtggggaaaatgtatttttttgtgattagttagaggttttagtagtagtggaagatgtatattagaaggcggtgtaaagggggattagagaggatttaaattggtattagggattgggtgtggtggtttatatttgttattttagtattttgggaggttaatatgcgagaattgtttgagttaggagtttgagattagtttaggtaatatagtgagattttatttttgtaaaagttttaaataattagttagatatggtggtgtatgtttgtagttttagttatttaggaggttgaggtgggaggattatttaagtttaggagacggaagttgtagtgatttataattacgttattgtatattagtttgggtagtagagtaagattttgttttaaaaaagaaaaaaaaatataaaaattggtgtcgggaaaagtagttgggaagttatggaaattgttttagtgagaggtgatgaatatttgaattagtggtaggagtttttttgaatttatttagttttaggggattgtttgatttaaaaaaaaaaaaaaagataaattagtcgggcgtggtggtggatgtttgtaattttaattatttgggaggttgaggtaggagaattatttgaattcgggaagcggaggttgtagtgagttaagatggtattattgtattttaggttgggtgatagtgcgagattttatttcgaaaaaaaaaaaaaaaaaaggtagtggttaagggattgagtggggatagatgggagatggattttagggtaggaagggtggatgtaagtgtgaaggagaggaagaatgattttggagagaatattagttttagtggtttgattttaagttttgtgtgttttttcgtatattgtgttgtttcgttatataacgaagattttattttagtttaatttttttattttatagtgaaaggagaagattaaaatttagaaaatggaaatttttatttatgttaaagttgagaaattaagtgttttttttttgatttaattttttttcgtaggtttatgatagggtgtatattagaattatttgtagagttttttaagcggtacgtgtttggtttatttttagatttagtgaattagaatttttgggttgggattattggtttattttagatagtgtataagtatttttttttggtgtaattttttatagtacgtttcgtttggattattttttttttttttgttttataattgtttattatatatagttattgataattgaaaaggttcgtagtgtttggatgaggaattatatgtaaataaatattatagtttttttttatagatttatttaattgatttgtaaatattttattgaaatcgtaggggagaggttttagaaggttatgttttagtaaggaaaaattaatggaagtaattgtttagtaagtagttattaatttaagttttataaaattgatattttttttatgagtgtattttagtaaaaatagggaatagtttttttttttttgagacggagtttcgttttgttatttaggttggagtgtaatggcgttatttcggtttattgtaatttttgttttttaggtttaagcgatttttttgttttagttttcgattataggcgttcgttattatgttttgttaatttttgtattttatagtagagacggggttttgttatgttggttaggttggtttcgaatttttgattttaagtgatttgtttgttttggttttttagagtgttgggattagaggcgtgagttatcgtgtttggttgggaatagttttaaaatataaaaaacgtaaaagttttaaaaaatatgggttttttaaagattttagtattttttatttttaattttttataaagttttgagttttttaattataatgtttttatttaaggaggtttttaggaataggattttagggttagggtaggaatatattattgttattttaatagtttattaattagaaaggtaaaaaaaaaattagattttttttaatattaatgaagttgaattgttcgttgataattgttaattagttatggtgtttttgttataaattgtttgtgtttgaattttttatatagtataatataaaatataaatagttgtggggtattttttaggtgttggttattgttttaagagttttaaatggagtaatttagttaattttgttttacggtataataattagtttcgtatgacggaggaaatagaagtttggagaggttaagtaatttgtttaaagttatatttagaaaggttggatttagagattgttgttaatattttttttatttatttgtattttatttttttttattaaatataaaaattagttaggcgtagtggtttatatttgtaattttagtatattgggaggtcgaggagggtggattatttgaggttaggagtttaagattagtttggttaatatagtgaaattttgtttttattaaaaatataaaaaattagttggatatgatggtttgtgtttgtagttttaggtatttaggaattcgagaggttgaggtaggagaatcgtttgaatgtgggaggtggagtttgtagtgagttaagattgtgttattgtattttagtttgggtgatagagcgagattttgttttaaaagaaaaaaaaaaaaatttaaaaattttttgtagttaaatttatgtatatattttttttttttgttggtttattgttttagttaatttgtttttttattttttttttatgttttatttattatttttatattttttgtatgatatttattttaaaatttagttttatttttttttaagagattgggagttttgttatgttttttaggcgggtttcgaatttttgggtataagcgatttttttgttttagttttttaagtagttgggaattacgttattaatatatttggttttttttagttaatttagaatattttattttttttagagattaaaaaatatttagatttgtttaggatatgttagatgaagtgaggatttatatttattatatgtatttttttaaatattaataattattttttttgaattatttattgtataatatttttttgttttattgttatatgatagtacgtttttgtttggttgtaattttatagtggtttgatttttaagtgaatattatatgtttaattgtttttttgaggatattgaagattttttttaatgattatattttttttattttatttgttatgtattaagtgttgatgttgttggttgttttttttagtgttagtttttatgtgttttggaattttagtttttaggtttatttttaggttttttttgtttttttttttttgttttttatttttttttgtttagtggttgtgtagttgttttttttaggggttagtgtttaggattaggttttatatggtagtcggggtttttgttttgggataattttgggaatgatttatatttagttttatggttgtgggtggtttagttaagtttaggtgtggtgtcgtttggtaattacgggtttttttaggttatagttttaggcgaagttagtagtaagttattttagtttttttgaagagggtggaagtgtgggtaagaggggaatttgagtttttaatatttttatagtgattatgatattggttttttattttagtgggtaatttaattttattttattatttagtatttaataggatttgattttttagttgtttttaattgtattttgagttagaatttaataggttatagttgtagttttgtttattttttgtatttatatttagtttttgggaatatttttggggatattttttttttgtggagtattgttttttaattttttttaatattatatttattattgttttgtattgaaagtttttgggttagtttgttttatttgtgtttattttttagaagtatttattgtagttttatattatatatttggggattattaataatttttttcggttatattttaattatttttttaaggttggattaggtgcgagattttgtagtagtaatttgaagttgagaattgaggaagtagtgttgttatgagaggagatttgcggtggtatttttaggatggggtgttggtggggggtgggtggtaagggggaaagggggtttttgtttaagggagtttttgttttatgttagtattttattagaggttttgagttagggtggaatttagttttagggagtatatgagagtaaataatggaagtttgatatgattattggatgaatatttgaagttttatatgtgatgggatttttttagaaaataatagtgtatattatagttaggaggtatttagagtattgtgttgttgtgttttttgaatttagtgagttaattgtttagtgttttatattattttgatttgggttaatagatggaggtagggtatatttttggttgtagttcgattcgttttttttgttgtagtaggatattttttagtagtataggtaaggtgtttcgggtaggggattgtatagtaagtggtgttttttttgtaatataagttaaataaggttttttgttggagcgttttttggttaatttaggggtatgagaggtagtatttatttttgtttaggggttttggtttttttttattatggggggtggtttgtgattaggtttagtgggattgaggagtaaatgtggatagtttttttcggtatatatcggttgatttgtatgtttagattgttttttggggcgtttgtataagttggttttagaatttaattttttttggaattgggtgttattttaggatagagaatatcgggagttataaattggttttgaagtaaacgaaagttttttaattttgtatgatatagtagattgttttgtttggggttttggtttggtttggggcgtgtagttttatgggggaatttttggtaattttattagggggagttttttttttattttggggttgtggattttagttttttagaatatttgtgtgtatgtgagtgagtatatttgatttaatttttatatttagtatagaattatgatttagttttttttgttaatgtagttaatttaagttattgttatggtttaggttttattatgttttaaatatagtttatgattgtagttacgtagtgtggtagtaatatagggtaatttggggttggggagaagtgagcgtgtttttttttttttaaatgtagttatttagtattttttttttttagagttttgtattttagcgatggggattaagatttagatttaaggatattttatttggattttggtaaggagatttttatagtgggaatttggtttagtttttttttggttttaggtttttattgtttattttttataaatgttatatggtaaggagttaattgagttattttttaaggagttggattggttttttggttttgtttgattttttttagttttttcgtaatttttatttgttcgttttttttttatttttttttttgtttatttgtattttttttttttagatgtggttatattttgtttttttaggtagcgtttttattgagtagtttttgaattattaattatttgtagttttatttatgttttttagggtatttgtaagaggaggaaggggaatttgttgatagttatagttgtgtattttattggaggtgtttttcggagggtagtatagttaatttagatatttagtatttttagtttatttttatggttttttttttttattgtttgggttttaaaaggtttaggataattttatgaggtggatcgagtagtatttggggagggaggatagaaaagagattgggatatttttaattaatagatattattaaaattttttttttagtagtagtagtagggatcgttagtggtagtaaatttataggggtttgtagtaattttaatttttgtttttttggttatttattgggattttattgggaaattgttgattattagttttagatgtttttattgggagattgtttgtttttggtgttagttgtgattaattattttagagagttcgttaataattgtttgatttttatttgatgtttgtttgatatttttgtgggtgtgtgtttggggcgtttttttttgttttgtttatttttgattagttatttattttaataggatgagaagatatataaaatagaggttattttaaaaaaaaaatttttagagtgtagtgtgtaaacgtttatttttattataaagatttttttgttaggggtaggaagtttttagtttgaattttgagtttcgtcgttgggatataggattttgaagaggaagacgttaatgatgatattgagttgattttatagtattttataattttttttttttttaagttatttgtatttagtatttattgattaagtaggtaggaaatgtaattgaagttttattagggatttttttatttttttttttatggggtttagtgattattttaggggtttgatttagtttagaatatttagagtttgggtttttgatttttagatatagttgatatgaatgggagtttttgtggttagtaaggttaaggtttttagttagttttttttggaatttttgatttttttttatttttattgttgtgtgtggggttttatgtgggagtagggtttttttttattattttaaggatttttaaattatattttttttatagtatttgggaatttttttttattttttatttttttgagtagtttttgttttttttagtttagtgtgtttattttttttttttggtagagaatttaggtgttgggggggttttttttggatgttttgttaatttttttttttttttttttaatttttttttttggtgaggttacgtaaaattttttggggttaggatgtgtaaacgttttttggaatggggtagaatagtgataaaataggaagaataaaaaaatatatgttaatattttaagaaagtatttagttattataatgaaggggtttttaggttttgagggaagattattgagttgaggggtttttgtattttattttagggaagataatggatgtttagaagaagtgggatatttggagttttagataaattaatgatatagattgagatattgtggagttggatgtttttttgtgtgtttgttagagtatgagaagttcgttgggaataagtaagggtatttttaattattagtgtttattgtttaagagagatggtagaagtgggttggtttaaatttttttcgttgtaaatgtggagggttaatattttgaaatattttttggttaggtgcggtggtttatatatgtaattttaggtatttgggaggttgaggtaggaggattatttgagtttaggggttttaggttgtagtgagttgtaattttgttattgtattttaatttgggtgatagagagagattttatttttagaaaaaaaaaaaaaaaatttttgatttattttatttgtattttttttttttttttttttattttttagtttttttagtagttggggtaggagggtgggcggttagtagaaagtagagttaagtagtattttttgttttataaattttaaatatgagattttatgggaattgaaaggatttatgatataggttaggtatttaggagaaatggatattaagaataattatttttttattttttaatagaaaggggtttttttgtgttggtggggtagaggggttataataataatgtgtatatttgtgggtattagagaaaggggtttttgggttgagttttggggaggtggtagaaatggtagataggtttgtggggttagatagaaagttttgttttgtttcgtttttgagttaaaggggatttggtgtttttgagttgggggtattgtgtggtgtttagttatatttttcgtggtgtttttagtgagtggtatttattgagggataggaggagtagagttgtttttaatagagaagtattggagtttatattgtttaaagtgggaatgatttaaatagtttttagtaggagaaaggggaggaaaattgtggtatatgtatgtagtggaatattttttagtattgaaaatgaatgtttttataattgtatgttataataggtaaatttgtagatataaagtcgagtgaaagaagttagttgtgaaagagtatattgtatgattttatttatataaagtttaggtttaggtaaaatggtagtagtgaggagagaggttgttttttggggagggtagtaattaaaaggtataggagggggtttttggtattttgggaatgttttttttttaatttaggtattggttgtatgtatatgttgtttgcgaaagttttttgagttgtatatttaaaattaatgtatttttttgtatgtatgttttatttatataaaaatatttttttaaaagatagaagtagttggatgtagtggtttacgtttgtaattttagtattttgggaggttaaggcggatggattatttgaggtcgggagttcgagattagtttgattaatatgatgaaattttatttttattaaaaatataaaaattagtcgggtgtggtggtatatgtttgtaattttatttttttggaggttgggaggtggaggtgagttgagatcgtattattgtattttagtattttagtttgggttataaatgagattttgttttttaaaaaaaaaaaaaaaaaaaaggattttttgtttttttttgtttgatattttttttgattttattttttttttgattatttttttatggttttttgaattgattttatggattttttatttgtattaaaaatggaaatggattagatgttgcgatttttagggtataaaatttaatgattaattttatgtgttaatttgattgtgttgtattatagggtgtttagattaaataatattttttggtgtgtttttgagggtgtttttaggtgagattagtattgtggatttagtagattgttttcgttagtgtggtgggtattatttaatttgttgagagtttgaatagaatgaaaagaggaaagagaaatttattattgttttttttcgtttgcgcgttggaattggaatattagtttttttttttttttggattgagatttgtattattagtttttttggtttttttggtttataagattgtggatatagattggaattatattattggtttttttgggttttagttcgttgatggtagattgtgggattttagagtttttataataatgtgagttaattttttattttatttattaatttatatatcgattgattgatcgatcgatagatcgatttatttaatttatttatttatttatttattatattatttattgatttttttttttttttttttttttttttgagataagattttattttgttgtttaggttggagtgtagtggtataattttagtttattgtagttttgattttttaggtttaagtaattttttagttttatttttttgagtagttaggattataggtgtttattattatgtttaattaatttttaaattttttttatagatgaggttttattatgttgtttaggttggtttttaatttttgggtttaagcgatttttttatttcggttttttaaagtgttaggattataggtatgagttatcgtgtttggttttgattttttttattgggtttgtttttttggagtattttaatatagatgggtttgtgttattgagagttttatttgttgttttttttataagatgttagttgaatttttgagtatgggtattagtattggtaaatttggtagtaaggtttgtgggttgtttatattagttaggtagatatttgattaagtttgagattttgatgtttttattagagttattaagttttatatatgttattgttgaagttaattttaatttatttggtaattagttggaggaaggggattatttttatttattgtagatttaaaagttggttatatattttttgttattttttttattgggaggtggggattttttaaatttgggtggttgtgtggttgttcgagcgatataaattgttggaagtgatgttaaattagtttttagtataggatttaatagtattttttattttttgttttttggagtattttttgggagtttgaattattatgtaaaaagtttaaaattaggttgggtacggtggtttatatttgtaattttagtattttgggaggttgaggcgggaggattatgaggttaggagtttaagattagtttggttaatatggtgaaatgtcgtttttattaaaaatataaaaattagttggatgtggtggtgcgtatttgtaattttagttatttagggggttgaggtaggagaattgtttgaatttcggaggtggaggttgtagtgagttgagattgtattattgtattttagttttgggtgatagaataagattatgttttaggaaaaaaaaaaaaaaaaaaaagttttaaatttaggttgggtatagtggtgtttcgtaattttagaattttgggaggttgaggtagggggattatttgaggttagaagtttagattagtttggttaatatagtgagagtttatatttataaaaaagaaaagattagtcgggaatggtggtttacgtttgtagttttagttatttaagaggttgaggtaggaggattgtttgagatttttaaggttgtagttagttatgattatgttattgtatattagtttaggtaatagagcgagattttgtattttttttttttttaaaagaagaagtttaaattttttgttattgtttgttggagtggtcgagtatggtattttggttaattattagtagagtttagttgtttttataaaggtgataaaaatgtgaaggaagttgttttgaatattttagattagttagttgtcgaagatggtattgagtgattttagttaatattaagtagagtagaattgttgaattgatagatataattttttatgtaaggaagtggttgttgttgtaagttattaggtttgggatggcggttgtttagtgatagataattgaaatagttgtatttgtatttggattagagtttttatgtttagggtgagtagttttttggttttgtaaggttttgttttttttaatttattttgtcgggttgcggttatagtattatttagttttttattttattatagtttattaaagtttttatgttaggtttgtggtagggtaatttattgtggaattgttttgttttgtttttgttgttttgtgtatattttttttattaagagagttattgggttttttgtttttaattttgaggtttttttttgagtatggagaaggtgggtagtgatggtatttggattatgcgtaaatatttaggttaagagaggtagaagtggattgtgggtgtgttttgagtagaggttgagattttttagggtttggaaatttggtgttttttttttacgagtgaggagatttttatttttgtttagagtatttttaggttgaaggattgttggagaatgtttagagaagttatgattttttttagttaggggtatagaggttagggtttttagggagattttattatgggtgatgtggatattgttgatgtgaggggaagtgttgggtttgatttagaggatattattttaggatttgtttgtagtttttgaaagtagaggtagttagagaaataatagtggtttttatgggttaaatgtttttgtttttttataattaatatgttgaaaatttaatttttagtgtgatgatatttggaggtggggttttttggaggtatttaggtttagttgaggttataagggtggagtttttatgtgtgattagtgtttttataagacgagttagagattagagttttttttcggttatcggtagtgagaaggttgtagtttgagaattaggaagagagtttttagtagatattaaatttgttggtatttggattttggattttttagtttttagaattgtgagaaatatatatttatttagttgggtgtggtggtttatatttgtaattttagtataggtttgggagattaaggtgggtagattatttgagtttaggagtttgagattagtttgggtaatatggggaaaattttatttttataaaaatataaaaatttaggttggtatggtggtttatgtttgtaattttagtattttgggaggttaagaagggtagaatatttgaggttaggagtttaaaattagtttggttaatatggtgaaattttatttttattaaaaatataaagaattagttgggtatggtggcgggtatttgtagttttagttatttaggaggttgaggtaggataattgtttgaatttgggaggcggaggttgtagtgagtcgagattgtgttattgtattttagtttgggtgatagagcgagattgtgtttaaaaaaaaaaaaaaaaagaaaaattagttagatgtggtggtatgtatttatagttttagttgcgcgggaggttgaggtaggaggattatttgagtttggaaggttgaggatgtagtgaggtgatattgtaatattgttttttagtttgagtgatatagtgagattttgttttaaaaataaataaaaatatatttgttatttaagttatttagtttttggtattttgttatagtagttagagcgaattaagttggttattttgagtattaaggatttggttttgtttttagtttttttggtattgtttaagtttttggtattttgtaatgtgttggagggaggagatagttttattaatgattagggttgaatttttttttagttttttgggtaggatatagagtagattatatttgattgagtaaaagtaaggaatgtgatattttatgtatattttatagttttaaatgataaaaataatatgttttttaagttatttggaatattttatagttttttgttttttttgtattgtaggtttttgtgtttattaatttattagtattttttttggtaaggattttttgaaatgtttttaagtttggaaattttgtttttatgaaaagtggggtatgggattagaggagggatttggttagaaaaataaaatacgattatttttgatttatgtttttattttttggttattaaatagttgttttttgtatttttttgattttaataaatcgtttagatatggatttttaaaattttatgtatgttttttgagatagggttttgttttgttatttacgttgaagtgtagtggtttattgaagtttttaatttttgggtttaagtaatttttttattttagttttatgagtagttgggattatagttatgtggtattatgtttggttaatttttaaaatttttttagtagagataaagttttgttatgttgttaggttggttttgaatttttgaattcgttatttttttattttggttttttaaagtgttgggattataagtgtgatttattatatttaggtttagtttttaaaatgatattttatttatgtagtttaaataaaaatgatattaataagtatatgagaaatattatttttattttatatttattttttttttttttttttatattgttcgttagtaattatttttattagaatagtgttttatttatttttttaacgtttttttatgtaaatataaataatatatttttatttttttttttattatataaaaaaagtatgttatatatattttgttttttttttttaaaatcgtaattaaatatattgggtatttttttttattattacgtaaagttgttttttttgttttttttattttgatagttttatagtattttattggtggatcgattagagttgtgtgttcgttagttttttattgttgggttgttgggttgtttttgattcgttgttattataaataatgttataatgaataattttatatttaagtaagtttatttttgtgtaggtgaatttataagatagatttttagaagggggatttttgggttaaagggtttgtgtatgtatagttttggtagatattgtaggtttgttttatagaattgtgttatttgtattgttgttagtaatgtatgggatagtttgtttttttttagttttttttatatattgtgatattatattttggatttttgttaattaaggaaagatttatgtataagtttaatatggatgtatttaggttaatttttttttttgtattttttttagaatatttttagtttttttatttattttagatattttaattagtttttattttttatgatataggttagttatgtttatattttttttgtgattattatagttatgaaagatttttttttgggttgataggttaagtaattatggtttagtattggttattgtaattaaattaatagttataggtggtttggattgttttagatggaattggttttaaatttaaaaggttattttgttattttttgtattattgttatttatgtttgtattttttataaatatatttatttaatatttaataagataaataaaatgttaaaaattattttgttttgggaaagtttaagtttttttgtatagaagttgaaatatttaaaggataagaaaaggtttttggtacggttttgttttggatagttttttcggttatttagtaggttgtttattgtgttgtttgagatgtaaatgatttttttttatgttggggaattttttaggtatggtaggggtagtggagaggttattttttttttttttttttttttttttttttttttttttttgagacggaatttttattttgttattaggttggagagcggtggtatgattttgatatattgtaatttttgtttttagggtttaagtgatttttttgttttcgtttttcgagtagttcggattataggtgtatggtattacgtttagttaatttttgtatttttagtagagacggggttttattatgttggttaggatggttttaattttttgatttcgtgatttgtttgtttgagtattttaaagtgttgggattataggcgtgagttatcgtattcggttattttttttttttttttgtttatttttttagttagttttaagatttgtttaatttttttttatggatggttttgtagaatatatatatggaaatcgtttataaattttagtttattaattaatgttgttagattgggaattttatgaaaagtttgtttgaaataaaaaattgaaaataagtggtttaaataaggtagatatttatttttttgttttatttacgaggtttgagatgaaacgtttagggtaggtgtggaggttttttggtatgatggatttaggtttttgttttttgtttttgttattttagtgtgtttttttttatttttagggtggttttatggtttgagatggttttaggattttttattttaggttttttggagtttatgatttttttttttttttttttttttgagatggagtttttgttttgttgtttaagttggagtatagtgatatgattttggtttattgtaatttttgttttttaggtttaagcgatttttttgttttagtcgttcgagtagttgggattataggtatttgttattgtgtttggttaatttttgtatttttagtagagatagggttttattatgttggttaggttggtttcgaatttttaattttaggtgatttattcgttttggttttttaaagtgttgggattataggagcgagttatcgcgtttatttatgatgtttttatggttaatattttgaggttttttaaaggtaagggtttttttgtttgtttattggtttgggtatagatatatttgtggattttggagtttaggtgttagggtatagttttttgaggtgttttaggtagttggttttttttgaggttttgatgatagtttttgatatgtttggggttgtggagttggggatggtttttattttatagggatttatttattttagtcggtatttagtttagggtttttgtttttttggttgtttttaaggtattgggtttttttagatattttttattatatttttaatttttttagggaattttagtttttagtaaataaaggtttgaaaagtgtttataaggaaattttgagtttaggtttttgaggtgaaggagtataaagtttttttttttggtttggaagtgtagggtggtgcgaagagtgggagggaggtagggttaggtgaggaaaaaatagaaaatataaattaatttgataatgatatgttaatttaaaaattataattttaggttgggtagatagtggtttttgtttgtgatttttgcgttttggtaggtggaggtgggaggattgtttgagggtaagagttcgagattagtttgggtaatatagtgaggttttttttttattaataaataaataaataaataaataaaaattagttaggtgtgttggtatacgtttgtagttttatttatttaggaggttgaagtggattttagtagtttgaggttgtagggagttatttattttagttagggtaatagagtgagattttgttttttaaaaaaaaaaaaaaaagaaaagaaaaattataaatttggaaaggagagttttattttttttaaagagttattgttgattgggtattgtggtttatatttgtagttttagtattttgggaggttgaggtgggtggatcgtttgaatttaggagttcgagattagtttggtaatattgatgtagaattttgttttttagtttagttaaaatcgggtttttgttatatgattaggaaaagttaagtaggtagatattttgaagggtgaggggaatggaattttttgggtgaaaaaggaaaagaagaaaagaaaaattttttagtaaagagtaaggggggtttttgttaataggtttttattttatagattgattttaggttatatatagtagttgaagaggttaggttttttttcgattattgtatattcggtacgaatttttcgtggttttattttatttttttagtatgtaggtaggtgattttttagggatttttttttttatttgttttttgtatttattattatttattttattttatatatttaaaatattattttgtcgggtgtggtgatttgtatttgtagttttagttatttaggaagttgaggtagtaggattttttgaatttaggaggtggaggttgtagtgagttatgattatgataatgtattttattttgggtaatatagtaaaattttgttttaaaataaataaataaaaaataaaattttattattatttttagaagtatagtagtttttataaattgttaaaggggtttgttttaggttagttttttttagaagtagatttggagataaagatttgaagtaaggaggttattagagaggaaatttttggtataattgataaagtagataggaaagggtagaagttagtatggggtgtatcgatgagtaatgaatttaatgaattttttggtttaattttattgggatttttaagagattattgtatagagtatgtttcggagttattttatttttgaggaagttggggtatttttttattaaattttattttatttgagggttgtttttagggtattgatatttttagtttgttttatttatgggtagtgtttttgtgattagggtaagtttttaatagtgttagaggtttaaagacggagttatttgaatggtaattttagaggataagtgggtagggtataaagtttggttataaggtttgtagtattaaaaggttaggaacgttttagagttgttttttttaggatggatttatttagtttttcggtttttattttttgatatttgttttttgttcgttgtttagtgtttttagtggatttataaaataattgtttttttttttttttattttagtttattattaagaataattttggggttttttattttaattaggttgtttcggtttttgtttatagtttttttgatatttggtttatgtgtgattttgttatttttaatttttagtagtaggggatgttagtttttttttagggaagaatatagattttttttgagagattatagtgagataattttgtaaattgaaaataaaattttaagttttttagttgatttaatggatttttttttggttaaggggattttagagaaattttaaaaattgagtttttaggtaggagaggatgggaggttagatacgtttcgttatattttattttttttgtggtttagataattattgattagtattaataaattagagattataagattgatagaataaagtatttgagttaatgaaagattaaattataaataagatttaaggttatggtaggttagggttaagttatatatttttgtatttaaagaaaaagtgttttgttataaagttttaatttttttttagtagttaaacgaatattggttttgagataagtaagattaaaataatttgtagatcgtttattagttaaaattatagtttgggttgaatacgagattgattttagtaatttttttttgataagaagattattgattatggattggttttggttggtttatagatgttgtatatttgagtttgtttgtgttttgaaaagattttttgatgtataagatttaattgtaatatatttatttttttttaattaatttattttttttttgagacggagttttattatcgtttaggttggagtgtagtggtgcgatttcggtttattgtaagttttgttttttaggtttatgttatttttttgttttagtttttcgagtagttgggattataggtattcgttattatgttcggttaattttttttgtatttttagtagagacggggttttattttgttagttaggatggtttcgattttttgattttatgatttatttgttttagttttttaaagtgttgggattataggtgtaagttatcgcgtttggttagttgtaatatatttaaatgttaagtttttattttacggtgtatatgggttatatgtaatatattagtttatttagtatatgtgttttaggattatttttatgaatatttatagttttttttgtaatttgttgaatatgtatatttggttaatttagttagattaaattttttttttattttttttcgttttttaaagtttattttttaggttttgttagaggttatgttttttattagttcgaatggtatattgtaggttgtaattttttatttttattttatttttaaatttatttttgagatacggttttattttgttatttaggttggagtgtagtggtgtaattatagtttattgtagtttcgatttttcgggtttaggtgattttttaattttagttttttaagtagttgggattatattcgtgtattattaggtttagttaatttttataattttcgtggagatagggttttattatattgatagatgtaggaggtagataagggaaagggtttttagagaatttttgatttgtttatgaatttgggagaagggggtggagttacgggaagttcgtgttatgtgtagttggggaggagtttggtttttttagtttttgtgtgtagtttggaattagtttgggggtgggggtgttgttggtaggaattttttttgttttgttgagagattttttttttttttttttttttttttatttaataaattttgttttttttattttttaatgcgtttgcgtttttagttttttttgtttgtgtgataagaatttggttttagggtttaaggaataaagttttgtattaataagatttaaaagaaattattttattgaaatatgattttaggtataggttagttgggggtttttgagttttagattttatagttgtgttgagatgtttgtttataagtttaaggagtatgtttaggagtttacggaggtaagtagaggtaggaagaggagattagaatttagttgtcggtggtgagttttaggaaattttttattaaagtttagaaaagttaaaggtgggttcgagagggaagaaagagataaagagatgggaagaagatggaagtaggatatttagagtgggaaggaaaaagagtaagagaaagtgagagggagtagtagagttttgggaagggagtttgaaggggtggggtacgtttggaagtttttgtgattatttggggaaggttgattttttagtgttttgggttgggtttatgtaggttattttttatttagttatttttttggtttttttgtttagggagttttttttgttagtttttagtttattgtattttttttttatatgtttggagtgtgtggaatgttgtttattattttggggtagttggagattgagataattttttttttggaatgtagggaatttggtgtgttggaaagagagaaagagagagggagatagaatgtattttgtagtagtatagttgggttttggatgggttttatttttgaaagagaggggtaaaagggttggggaaggggtagttgtcggttttagtgaagggttttcgaggtattagcgtgtttttatatttgtgttgtttgttttttagaagatttagtatatggggaaagtggtgttaagggtatatttattagttatattgtggagtttggatatttggggtaggatatttagtagtcggtttggggatttttaaagatgtttttttattttttagtttgttagttttggtagggatattatttttttttttattttttaatgaggatatttaagataatatttttgagttggaggaaatttagttttattttttttttttattttttattttttaagttttttatcggtggtgtttggggtgtggaacgtggggaggtaaggaagatagtttatttggtttaggttttaatgtttagttttttttattttttttagtaagagttttttgtaaatattttaatttttttttttattttttgtagttgatgtttaaattgttaatttgttatttgagattatgaatgttggttataagaatttgttgattttttaaaaaaataaaaatgatgtttgtttatttaaagttttaaattttgttttttagaggagttttttttttttttttttttgagatagttattttttgttgatatggttttgatgagtggaggaatattagggtttttgttttatatcgaattagataagatgatacgaatatacgtggagtggttttaaggagcggagagtttaataggtaagaaagaagggagaagaaagaaagaagaaatttttttgtatagagatagagggaggggggttttaaagtcgagagatggaatttcgtatttaggtaatattagttagttatattcgatgggtggaggaggtagtatttgatttgtataggatttaggggattggtttgattaggtatgttatttatgtagtcggcgaaaaagttggtttttttattttagttttttaatatgtaaatgtagggttgtgttatgttttatatacgtggggatatgtgggggcggttatgttgttaggtatatgtaggggtaagggtaagaggataaaggtgggaatagttttgttgggtggatttagtttttaatagttagcgtttgtatataaaaggttgttggtttaagtttaagagttagggtttttatgttagataagagttgtgaaaaattttttatggattttttttttttttatttgtttaaaataattttttaataatttttattttattgtagtttaggttggagtgtagtgtggtaatatttcggtttattgtaattttcgtttttcgggtttaagtaatttttttgttatagttatttatatagttgggattataggtatttattattaagttcggttagttttttgtattttagtagagaggggttttattatgttggttaggttggttttgagtttttgagtttaagtaatttatttgttttggttttttaaagtgttggaattataagtatgaattattgtatttggttttttataggagattaatggttgattttatttattaatttggtgattatgaattagttatttataattttgttgatttagtttaatttattatataaaattgtgtttggattgtatggaatgttatatatttataattaaagatatttagagttgggtatggtgggttatatatgtaattatagtattttggaaggttaaggagggaggattgtttgaatttgggatttttagagtagtttaggtaatatagtgagaatttatttttttttttgtttttttttttttttttttttttttttgagatggagttttgtttttgttgtttaggttggagtgtaattgcgcggttttagtttattgtaattttcgttttttgggtttaagtgatttttttgttttagttttttgagtagttgggattataggtacgtgttattatgttcggttaagtttttgtatttttagtggagatggggttttattatgttggttaggttggtttcgaatttttgattttaggtgatttattttttttagttttttaaagtgttgggattataggtatgagttattatgttaggtgggggtaggtggggaagtttatttttattaaaaaaaaaaaaaaaaaggttaggtgtggtggtttatgtttgtaattttagtattttgggaggttaaggtaggaggattatttgagattaggagttcgagataagtttgtttaatatggtgaaatttcgtttttattaaaaatataaaaaattagtcgggtatggtagtacgtgtttgtaattttagatattcgggaggttgaggtaggagaattatttgaatttaggaggcggaggttgtagtgagttgagattttgttattgtattttagtttgggtgatagagggagattttatttttaaaggaaaaaaaaaaagagaaagtaaaatttgtattttaatttagagattataaataatgtatatttgattttgtggtagtgattattattgtataatagttatttaaatttaggaggtagaggttgtagtgagttaagatagttttattgtattttagtttgggtgatagagcgagattttgttttaaaaaaaaaaaaaaaaaaaagttatttatttatttgttttgtagaatttatttattgttgtgtttatagaaaaggaagtattaagacggtaaagttttttgatgaaaagttaggcgtatttatatatataattgagaaagttttggaagtaggagaaaacgtttttaaggtatataggttaaatttatataaatattgttagtgtttgttaaaatagggataatttagtaaaattagagatataaagttagaatagagaattggtaagtaaaaaattgttaagaatgtatattggttgggcgcgatggtttatgtttgtaatattagtattttggggaggttgaggggggtagattgtttgagtttaggagtttgagattagtttgggtaatttttttattattgaaaatataaaaaaaaaaaaaaaaataaaaaaataaaattgggcgtgttggtgcgtacgtgtggttttaattattttggaggttaatgtggaaggatcgtttgagtttagagcgtgggggtgggggttgggaggtaaggttgtagtgagtttggattgtattattgtattttagtttgggtaatagagcgagattttgttttaaaaaaaaaaaaagtattaaaaggtttaggaatttgttttttaggtaaatttgtttttttttatttttaatttttatgaaattatttaaatggagatattatagtaaggtttcgataaggaaatgataggaatgtaggtggataagggattggaatagtgtagtataatattaattataggttttagttttaatgagattgtttttattttcgtcgttagttataagtgtggaggtttttaggttattcgtttttttgattaattggttattaatttggggggtatttataattttttcgggtttgataatttgttagaataatttattaaatttaggagaatgttatatttacgattataggtttgttataaaggatataaattaggaggattagattaatgaagatatacgtagggcggggtttgggcgggttttttatgtagagtttttgtgttttttttttgtgaattaggttgtgttatttttttggtatatggatgtgtttattaattaggaagttttattaaattttggcgtttagagtttttattatataggtataattggttgatttatttgttatcgaattgaacgtaatttttagtttttttatttttcgtcgaggttgggttggttttaaggtttaatttttttattatgtgatttttttgatgattaattttttatcgtgagtttttttttagtataagtttaggtgtgatttaaggggtttatgaataataaagatatttatattatttaggagattttaaggatttagttttttttttaggaattagggataaagggtagttaaattttttattgttattatagagatatagtaatataatatgatatagtagaagagaggtgaagaatgttgttatgttttgagaagtttattataagagttttaaggaatttatatttaaatattaataggtatattatgaaagaaattagttaagtatagtttttttttattatggaatttagttattgtaggaattgaaaaattgatgtaataaagtttagaatgtaataaaggaatcggtatttaagtagatgagagaggttggggaatatgttaagatgtaaaagtgagagagttgttatagtttatttattttgtaatttttgaggatggaataggattaaagatgaagttaggaagtatagagtagttttttttttttttaattttattttttgtttttatttggtattttaaaaaatttttatatttatatttatatggaattgattttgagtatagagagataattttaattattattgttttttaaatgttagttagttgaattatttattataattaaggtgattatatggtttattttttttggtttatagagatgataaatttgaatatattttaaaatataaaattatttttaaaatttgaatatatttgaatatgatatatttgaatatattttaaaatatagtgttatttttgtatttttggttagttatggtgtatttttttttaatattttatattaaatttttattttttggattgagatattagagtttttaaaggtttttttagaaattttttttatatttagtatgttattagaaaattttttataattaattttatagaagatattgttttttttgtattttgtttaatattaaaggaaatttttaagttttaaggaggttaggttattaatatttataaatgaattttgatgagattattatataataaataataattgttgtttattatatgtttattttgtattaggtaggattaagataagtattatttaagttttaagattatttttaattttttgttaaaagtatattggtttgtaaagtaatgaataaaataaatttttaataatatttttatagtaaagataatggtgaattttttatgttttttttaaaaaattttgtttatgatgataattttaaatatatatagaagtcgtgagtatataatgagttttgttgtatttattataaagttttaaaaattgttaaaagttgattatatttatttaatttatttttattatttttttagttggagattttttaaagtaaattttatatattgtattatattatttataaattattttgtattatattttatttttattgagtttttgtaagttgagagtcgattgttaaagtataatttattgtaagagattttgtgaagggttaaaataaatagtttaaatttatagtgttgtaaatgtttgtaattgtataatttgtaaaatatattttttaagaaattttttgtgtatttggttttttttaattgagttttttttttttttttagattagattaattgatgagaattgataagtaggggagagaggtgatgtttaaggttatatattttggtaaaaaattatgagtgtaaattgtgtttgtttttgattaagagaggtttattaattagaaagtagatttggtatttttgtagaaaaattatatagtttaataagaatttatgattttgaattgttgtatagataggtagtatgagtttttggtaggatttttttagttgagttgttttttattagaatggtgtttgatatggtttagttgggtttttatttaaattttattttgaattgtagtttttttaatttttacgtgttatgagagggatttggtgggaggtaattgaattatgaggggtaggttttttttatgttattttttttgtgatagtgaataagttttatgagattttatggttttataaaggtagttttgtatacgtttttgtttgttgttatgtaagatatgtttttgttttttttttattttttattatgattttgagggtttttttagttatgtggaattgtgaatgtattaaatttttttttttttataaattatttagtgttaggtatttatttatagtagtatgaaaacggattaatacggttgggtgtagtggtttatgtttgtaattttagtattttgagaggtcgaggtaggtgaattatttgaggttaggagtttaagattagtttggtggttaatatggtgaaattttatttttattaaataaataaataaaaaaaattagttatgtatggcggttggcgtttataattttagttatttaggaggttgaggaaggagaattgtttgaatttgggaggtggagggtgtagtgaatcgagattgtgttatcgtattttagtttgggtgatagagtaagattgttttaaaaataaaaataaaaaaagaaaatggattaatatattaaattggtattagtaaagtggggtattgttataaagatatttgaaaatgtggaaatgggtaataggtagaggttagaagtttagagggtttagaagaagatataaaaatgtgggaaagtttggaatttttttaagatttggagggtttagaagataggaaaatgtgggaaattttggaattttttagagatttgttgaatggttttgattaaaatgttgatagtgatatggataatatttgtttaggttaaggtggttttagatggagataaggaatttgttgggatttggagtaaaggttattttttttatgtaaagagattggcggtattttgtttttgttttagagatttgtggaattttgaattgaaagaaatgatttagggtatttggtagaagaaatttttaagtggtaaagttgtttaagtggaagtagagtataaaagtttggaaaatttgtagtttgacgatgcgatagaaaagaaaaatttattttttagggagaaatttaagtttgttgtagaaatttgtataagtaaagaggagtggaatgttaattattaagataatgaggaaaatgtttttagggaatattagagaattttatagtagttttttttattataggtttggaggtttaggagggaaaaagggtttgtgggttgggttaagggatttttgttttatgtagtttggggatatggtgttttatattttagttattttagttttagttgtggttaaaaagggttaatttatagtttaggttattgttttaggggttttaagttttaagttttgatagtttataaatgtgttgggtttgtgggtgtatagaagttaagaattgaggtttgagaatttttgtttaggttttagagtatgtatgtaaatgtttagatgtttaggtagaagtttgttgtaggggtggagtttttatggagaatttttgttagggtagtgtagaagggaaatgtggggttagagtttttatatagagttttttatcggggtattgtttggtggagttgtgagaagagggttattattttttaaattttagaatggtagatttattaatagtttatattatgtatttggaaaagttggagatatttaatattagtttatgaaagtagttggaaggggggttgtattttgtaaagttatagaggtagaattatttaatgttgtgggagtttatttttcgtattagtatgatttggatgtgagatatggagttaaagggggagtattttggaacgttaaggtttaatgattgttttattgtattttagatttgtatggggtttgtggtatttttattttggttaatgtattttattggaatgggtgtatttatttaatgtttgtatttttattgtatttaggaagtaattaatttgtttttgatttataggtttataggaagagggatttgttttgttttagatgatattttggagttggatttttgagttaatgttgaaatgagttaagattttggtggattgttgaaaggtatgattgtgtgttgaattgtgaagatatgaaatttgggaggggttaggggaggaatgatatggtttggttgtgtttttatttaaatattattttgaattgtagtttttataatttttatgtgttatgggagggatttggtggtaggtaattgaattatgggtggcgggttttttttatgttattgttatgatagtgaataagttttatgagatttgatggttttataaagggttgtttttttgagtatgtttttgtttgttgttatgtataatatgtttttgttttttttttattttttattatgattatgaggtttttatagttatgtggaattgtgaatttattaaattttttttttttttttttttttttttttttttttttttttttttttttttttttttttttttttttttttttttttttttttttttttttttttttttttttttttttttttttttttttttttttttttttttttttttttttttttttttttcgagttttattttgttatttaggttggagtgtagtggtatgatttcggtttattgtaatttttattttttgggtttaagtgatttttttgttttagttttttgagtagttgggattataggtgtgtgttattatagttggttaatttttgtatttttagtggagacgaggttttattatgttggttaggttggttttgaaattttgattttaggtgattcgtttgttttagttttttaaagtgttgggattataggtatgagttacgcgtttagtttagaattataaattatttagttttgggtatttttttatagtagtatgaaaatggattaatatattattttttggaagtgaatggttagagtgaaagaaattagaaaaaaaaaaaaaaaagaagaatatatattatatgattttatttatataaaattttaggagaagtaaataatttatagtgatagaaagtagattagtgagtgtttgagaatgggtatggtaggagggaaggaagtataacgggtatgagaaaatttttgagaggtatggatgtatttattattttgattgtggtgatagttttatagtatataaatacgataaaattgattaaagtgtatattttaaatttgtgtaattatgttttaataatttttttttttaaagaatagttaaggtcgggtgcggtggtttatgtttgtaattttagtattttgggaggtcgaggcgggcggattacgaggttaggagatcgagattattttggttaatatggtgaaatttcgtttttattaaaaatataaaaaattagttgggtaaggtggtaggcgtttgtagttttagttattcgggaggttgaggtaggagaatggcgtgaattttagggggcggagtttgtagtgagttgagattgcgttattgtattttagtttgagtgatagagtaagatttttttttaaaaaaaataaaaataaaaaaataaagaatagttaagtggtagaaagtttgtagatgttgttttagagttgtgtttatagttttgggtttaggttataggtataatttgtaataagaagagataagagtttgagggttgattatttgtgggtttataagttaaggaaattaaagtttgggtgtataaattattattggaaagggattttgatttagttattttttaagagagggtttttagatattgtgtaagaaagaatttggggcgagtttatagagtaaagtgaaagtaagtttattaagaaataaaggaataaaagagtggttattttataggtggagtggttttgagggttgttagttggttatttttatgattttttttttttttttttttttttttttttttgagatatagttttgtttttggagtgtaatggcgcgattttagtttattgtaatttttgttttttgggtttaagcgatttttttgttttagttttttgagtagttgggtttataggtatgtattatttttagttaattttgtatttttagtagagatggggttttattatgttggttaggttggtttttaatttttgatttgaagtgatttgtttgttttggttttttaaagtgttgggattataggtatgagttatagcgtttagttaattattttttaattatatgttaaataaggggtggggtatttatgaattttttgggaaagggatggagattttttggaattgtgggttttttttttttttagattatatagggtaattttgggatattgttatgatatttataaattattttggtgttggtggggggtgatttttggtatgttaatgtattataattagtatgtaatgggtagtgaggatgattaaaagttatttttgttattattttggtttgggtcggtttttttattgtattttattttattagcgaggtttttgtggtttgtattttgtgttgattttttatattattttgtgattaagaatttttaattttttgggaatgtagtttagtaggttttagttttattttatttagtttttatttaagatggagttgttttgatttaaatattttcgataaaattattgattgggtatagagttttaattagttagttattgaaattttgtttttttgttataatagtttagtttaatttaattaaagaaagggggattaggaagtaattttatttttattttatcgtgtttttttatatttattttgtgggattttttttttttttgttttaagatgaaatttggagtaagttttatgaattttttagttatttgtaggtaatttaaggttattgggttattttaattttttaaggagtttaataagtaattaaatggtttaattttatgtaatagtagaaattttaaattttatttaaatttgagattttttttcgtattttatgttatttatagattagttatttttaatgggaattgaggtgtgtggtgatttttgattttttattttgcgttttgtggtagaaattgtagttattattaaatatttattttttttttttttttgattagtaagatttttaaatttttgttggatttatggttagtttgaaataagattatattttttagtattttttgtagttaggtgtggttgtgagattaatttttggttaacggatttgaattagaataatataagtaattttttgttttgtttttaaatagtatgggtggtattagttttttttttttttttttttttggttggaatgttgatttagtagatgtggggagttattttaattttttaagagagagtagttttcgatgtaatggtagagtagtaagatagaaggagttggggtttttaatatcgcggagttattttatttagtttaagatttttgatgttggaattgttaatgagaaatatattttgttttttgatatatagttttttttttagttgttgaatttggattttatttatataggtttattgtgtatgtatgtttttatttttttttttttattttgttaatttggattttggatttttttagggttttagtggtgagagggaggggttaggaggtattattgtattagaattattgtgagatggtagaagtattgtttgggttattaggtatagttgatttttttttttattaggtattttcgttgatttttttgagttaatattttttttttgttacgattttttattatttaattttttgaggtggataaatgtttttttttaggttggttaattatatttttttttgtagtttttaagagtttgacgatttatttttttattaggattattaaatttttttagatgatttttttagatagagtttaatgttattttttgttattttttttttatggtggttttatttgtggtttataggaaatatgaatttagtgttttcggtaattgcggaaggttggtagttttgaaatttagttattttttttgttttattattagggtaggtagttagatttttggtgtttttttttgttgtgtgtgtgtttttgtgtgtatatgtgtttttttatttttagaaatgaattagttagttgtttattttgttttttaaattgtaggaatatatatttagttttttgacgggtattattaaaggtttttttttggggttcgaagaaatatttttattgaatttaatttttttaagtaattgaagatttttttttttttttttttttgttttattcgatggtttttattttatggggatatttttaggtcggggattgtagagttgttttgttatttttggattttggtttattttatttttttttttttttttttttatttaagaggagatttaatttttttagaagtttattgttttgagtaagagttattgtttgttagattttagttttttttgtttttattatttgttttattttttttatagttgtagaggaattaatattttcggaagatttagtgaagttgtttttattttttttttttgtttttatattttttttttagtttattttaatttgaggttataggtagttgggttttattagtgttattgttattattttaaaaggttaggggtttttattttagtagtagtaattaatttgttatgtataatttatagtattttaatattaggttttaaataagtaatttgagtatttttgggttttgttaatttatgggaatgtgtaaatggggttattttaagatagtaataatattttagtgtttttttttttgtttaagtatttttgggggtttgagggaaattttattcgtgtttttaaatttaggtatttaggttaatagtaattttttatcgtttgttgagtatttttttagggaatcggagttttttaggtattaattttgtattgggtagagtagtgtttatgtttagtggggaaatgtttttttttttttttgtgtttttgtttacgaaggggttatttaagtaatgttggtgggttttagtattgtgtagagtttgtagaattatagtttttatgttgatttttagttttttttttgtttcggatggaggtaggattggattaaatgtggtgataaataatatttatttatttttttatttaatatatattttttaaattttttatttatgttagttatatgatgaatatgataaataagataaacgtggtttttgtgtttatggagtttatggtttggtataagattaaaaagcggtatatatatatataaatacgaataaaaaagtagttatgatttaatgtttaagattttgttattggtttaagtttattatgtatggatgttttttttgtttggatgagttttgtgcgtgtagtttgttaatttttaggtaaataaatagattttgttaatttattgcgattttattgttttcgggttgtttgttggggtttagtgagggaggttaatttttattgtgttaaagtgtttgatttgttttaatattttaataattaaagaaaatattgattgtattttttaaagagttttttttttttttttattttatattatgaatttatgaattttaaattttatattttatgtaaatttgaagtttttggttaagcgtggtggtttatatttgtaattttagtattgtgggaagttaaagcggatgattgtttgagtttaggagtttaagattagtttggataatgtggtaaaatttcgtttttattaaaaatataaaaattagttaggtatagtggtatacgtttgtaatcgtagttattgggaggttgaggaaggaggattattggagtttaagaagttaaggttgtagtgagttatgattatattattgtattttagttttggagacgtagtaagattttgttttaaaaaaataaaataaaaataaaataaataatatttgaggtttttttatttattttgtgttatttataggttagttgtttttggtgagaatggaggtgtgtagtgattttttattttttattgtgtgttttgtggtagaaattgttgttgtttttaagtatttatttttttttttttttttattaatgagatttttaaatttttgttggatttgtggttattttgaattaagattatattttttagtattatatgttgtgggattagtttttggttaatatgatttgaattaaatgatgtgagtaattttttgttttgtttttaaatggtaggggtgatggtaaaaattttggtagtaaaaatggatgatgtggttaggtatgttggtttatatttataattttagtattttgggaggttgagatgggtggattatttgaggttaggagtttgagattattttggttaatatggtgaaattttatatttattaaaaatataaaaatgagttagatgtggtggtatttatttgtagtgttagttatttaggaggttgaggtaagagaattatttgaatttaggaggcggaggtggtagtgagaagagattatgttattgtattttagtttgggtaataaagcgagattttgtttcgaaaaaaaaaaaaaaaaaaaggatggtgaaggtttatatattagtttgtttttatgttgttgataaagatatgtttgagattgggttatttataaagaaaaaggggtttaatggatttatagttttatgtggtaggggaggttttataagtatggtagaaggtaaaaggtatattttatatggtggtagataagaagagaatgagagattaagtgaaagggatttttttttataaaattattcgattttgtgggatttattattataaaaatagtatgggggaaattattttttgtgatttaattattttttattaggttttttttataatatatgggaattatgggaattataatttaagatgagatttgggtggggatatagtttaattatattattttgttttagttttttttaaattttatgtttttatattttaaaattaattatgtttttttaatagttttaatttattttagtataaatttaagagtttatagtttaaagttttatttgagataaggtaagttttttttaattatgaggttgtaaaattaaaagtaagttagttattttttagatatagtgggggtataggtattgggtaaatatagttattttaaatgggagaaattggttaaaataaaggggttatagtttttatgtaagtttaaaatttagtggggtagttaaattttaaagttttaaaattatttttattgattttatgttttatatttaggtaatattgatataagagatgggtttttatggttttgggtagttttgtttttgtggttttatatggtatagttttttttttggttgtttttatgggttggtgttgagtgtttgttgtttttttaggtatatagtgtaagttgtgggcggatttattattttggggtttggaggatggtggttttttttttatagttttattaggtagtgttttagtggagattttgtatgggggttttaattttttatttttttttcgtagtgttttagtagaggtttttcgtgagagttttatcgttgtagtaaatttttgtttggatatttaggtgaaatttagttggaggtttttaaattttaatttttgattttagtgtatttataggtttaatattatgtggaagttgttaaggtttggggtttgtattttttgaagttatgatttaagttgtattttggttttttttagttatggttgggatgtaggtattaagtttttaggttgtatatagtaggggggttttaggtttggtttataaaattattttttttttttagtttttaggtttgtgatgggaggggttgttgtaaaggtttttgatacgttttggagatatttattttattgttttggtgattaatatttgattttttattatttatgtaaatttttttagttggttcgaatttttttttagaaaatgatttttttggttgggcgtggcggtttatgtttgtaattttagtattttgggaggttgaggtaggtggattatttgagtttaggagttcgagacgagtttgggtaaaattttatttttataaaaaatataaaaattagttgggtacggtggtttacgtttgtaattttaatattttgggaggttacggtaggtagattatttgaggttagtagtttaagattagtttggttagttaatatgatgaaattttgtttttattaaaaatataaaattagttggacgtggtggtatgtgtttgtaattttagttatttgggaggttgaggtaggagaattgtttgaatttgggaggtagaggttgtagtgagttaagattatgttattgtattatagtttgggtgatagagttagattttattttaaaaataaataaataaaaaagaaatgggtttttattttttattatatcgttaggttgtaagttttttgaatttttatgttttgttttagttttaaaattgaatgtttttaatagtatttatattattttttgaatgttttgttgtttagaaattttttttgttagatattttaaattattttttttaagtttaatgttttataaatttttaggttaggggtaaaatgttattagtttttgtggtaaaatatagtaagagttatttttattttagtttttaataagttttttatttttatttgagattattttagtttgtattttattgtttatattattattaggattttggttaaagttatttaataagtttttaggaagttttatatttttttatatttttttgttttttgagttttttaaattgttttagttgttatttgttatttagttttaaagttgtttttatatttttgggttattttatagtagtattttatttttattattaatgtattgtattagtttttttttatgttattgataaaaatatatttaagattgggtaatttataaagaaaaagaagagatttaatggatttatagttttatatggttggggaggttttataattataattgaaggtaaaagttatgttttatatggtggtagataagaatagaatgagagattaagtgaaaggggtttttttttataaaattattagattttatgagatttatttattattatgaaaatagtataggggaaattatttttgtgatttagttattttttattaggttttttttgtaatatatgggaattataggagttataatttaagatgagatttggttggggatatagttaaattatattagtttataattttagtattttgggaggttaagataggattattatttgaggttagaagttggagatttatttgggtaatatagggagattttttttttaaaagtaaataaaaaattaagttatttaggtatggtggtatgtttttgtagttttagttgttttagaggttgagttggaaagattatttgagtttaggagtttaaggttgtagtgaatcgtgattgtgttattgtattttagtttaggtaatagagcgaggttttttttttttttttttttttttttaaataaggaagaaaaaagaaaagaaaatagggtggtgaggaggttggttaaagtggtgataatttcgtgtattaggttttagtagttggtagtaggggagttaggaggtgtagtattttgtttggtaaagtagtttgttagggtttgtttgtttgagagttgataggttgtaagtataaaaatataaaagggggttagggatttgttaattttgtcggagagtcggcgtagtttagtgtaaggatttgggaaggtagggaattttgagagaaggtaaaaaggaggtggatttatggagagggaaggggaaagttgagggttggggaggtgtggtgaggagttgagattttggagagatatttttcgttggtttagggatattatataaatatttttgtgtatggtgggagggattagtttttttttaaatattgtttagattttggttttgaaaattatgattattaacgttttttgggttttttgtgagtgtgattagtttttttagtttttagttggtatataaaggagatgtgttttttttttgtcgatgtgaggttataggattttatgaggaatattttatgaataaatagtacggttgagtttttatttgcgttttattttaattttggtttttttttagtatatttttagttttatcgtttggagttatagataaattcgtagattaatgtgaaaagttaattgtttagagaaatttagtagagtttttagttacgtttgatagttattcggggttaaatattagtttggaattttagttttttgtttaggaaaaattaaatatataaattattttttttttttttttttttttttaatggagttttgttttgttatttaggttagagtgtagtggtgtgagtttagtttattgtaatttttgttttttaggtttaagcgatttttttgttttagttttttgagtagttgggattataggcgcgtattattatgtttggttaatttttgtatttttagtagagatagggttttattacgttggttaggttggtttggaattattggtttcgtgatttatttgttttggttttttaaagtgttgggattataggtgtgaattattacgttcggtttaataatttattttattattagaattttaggttttttttttaatttgtttgtttttttgttggtttgtgttttggaatataggaatttttaatttttttaatatgggttttatttaaattttaagttgaattgtaatttttagtgttggagtgttggaggagaggtttggtgggaggtgattggattattggggtagattttttttttgttgttttcgtgatagtgagtgagtttttacgagatttggttgtttgaaagtgtgtagtagagtcgggcgtggtggtttacgtttgtaattttagtatgttgggaggttgaggtaggcggattatttgaggtcgggagttcgagattagtttgattaatatggagaaatttcgtttttattaaatataaatttagtcggtatggtggtatatgtttataattttagttatttgggaggttgaggtaggagaattatttgaatttgagagatggaggttgttgtgagtcgagattacgttattgtattttagtttgggtaataagagtaaaattttgatttaaaaaataaataaataaataaaataaaataaaaaaataaagtgtgtagtatttttttttttatttttttttttttttattttatcgtgtgaagaaggtgtttgtttttttttgtttttttgtttagattgtaagttttttgaggtttttttaagtatgatttttgtatagtttgtggaattgtgagttaattaaattttttttttttataaattatttagttttaggtagttttttatagtagtgttaatatattttgttataggattaatatattttttttttgttaagtgtttattgatttgaaaatatatgttatgaaatattaaaacgttatttgagattatgtgttttttttattaagtgagagatttttttataatttggataattttatttcgtttgtaagtaggatgttttagaattgatgttataaagttagtttaatgatttaaattttattgtggagaaaatagattttcgtagaaaagtatatttttgtttttttttagttttttagttaagggggggttttttgttgagtttggagaatgtttttaagaaggtgattaatgtattatatttggtttttagtgtgggtagtaggtaagtagttaggtgtttttttaagtggagaaagttgaacgttattttttagagatattggatgtgagggtgatttggttatgatatttgttattttagtgattgttattgttgattttgttgatttagttggttaggtggtgtttttttttttttttattattttatgtgtattttttttgaagttgtgtgtttagttgaagaggaggattatttttaatagaggaggattagttttcggttaagggtatacgagtagttgcgtttttttgttagaatttttaaataagtttttaaggtttagagataagatgtgaattttatgttttaattgatgattacgtggttgtgtggtggtgtagattgtgtttttgatgtgtagtaggattcgggtagtatagaggatgatgttagtatattattattatttttaggtggggtagattattatgaagtttttgtttttggtttttttggagtttaggtgagaggtgtatgagatattttttgggtattttttttttttttttaaggtgaatgttttattaataaaattaagttaatagaagttttaggttgttatttttggtgttttgaataggatatttgtgtgagagtttttttgattaatttattgttagtttttttttattttgatttttgaatttttataatatttattttttatttttttcgttgattaagtggttttggattttagttaggcgttaaaaatttgttatttgtgtttaggttagttttatttatagttgaatggttttgaggtttacggtggaagatttttaagggggatagttttgttgtttttgggatggaataggtatgatggtgatttatttatttgtaagttttggttttttagtacgtatatgatttagaattagaagtatataatatatagttttgttattggtatttttttttttaattttgttttttttttgtattaggttatttttgtattgttataaagaaatatttgagattgggtaatttgtaagaaaagaggtttaattggtttacggttttgtaggttgtataggaagtatagtagtatttttttttggggaggttttaggaagtttttaattatggtggaaggtgaagggggagtagggattttatatagcgggagtaggagtgagagagagtgatggtaaaggtgttatatttttttaaatgattatatattataggaatttatttattatggtgagtatagtgttaaaggggatggtattagattatttatgagaaatttgtttttacgatttaattattttttataagaatttatttttaatattggggattatattttaatataagatttgggtagggatacggatttaaattgtattattttttatattattttttataatattatgttaatttgattatggttaggtttaattttttttttaaaggttttttagagattattgaattttatgatttaaatttttttgtatggtagataatttgttgaagaaagtttgtttggttgggtttagtggtttatatttgtaattatagtattttgggaggtttatttagtttgcgtttaggagtttaagattagttagggtaataaagagagattattgtttaaaaaaaaaaaaaaattagttaggtattggggtatatgtttatagttttagttattgaggaggttgaggtgaggggattatttgagtttaggaggttgaggttgtagtgagttgagattatattattgtattttagttttagtgttagagtgatattttgttttggaaaaaaaaataaaaaagaaagaaagtttgtttgattttacgaaaggtttttgtaggatacgtttttagtttttataaaatagttattttttatttttttattggtaaagtttttatgaatattatttatttgttattttagtgttgtttttttagatataggtatattttggagatattgcgggttgcgggtttagttttagtttattataataaagggaatatttcggtaaagtaagttattaagtttttgtttttttagtgtatataaaagttatgtttatattatattatggtttattacgtgtgtaatagtattatgttttaaagaagtatatattttaattttaaaatattttattgttaaaaaatgataatgattatttgagttttcggagagttataatttttttgtgggtggaaggtgtgttgttgtttgattagagtgggggttgttgaagtttaagtggttatgataattttttaaattaagataataacgaagtttgttatatcgatttatttttttttttgtgagagatttttttgtagtatgtgatgttgtttgatatatgttatttatagtaaaattttttttgaaattggagttaatttttttagattttgttgtttttttattaattaagtttatgtaatattttaagttttttgttgttattttaataatgtttatagtatttttaataggagtagatttcgttttaagaaattattttttttgtttatttataagaagtatttttttatttatttaaattttattatgagattgtagtaatttagttatatttttaggttttatttttagttttttggttttttttattatatttgtagttatcgaagttaggaattttttaaaagttatttatgaaggtttgtattaaattttttttaaatttttgtaaatgttgatattttgattttttttcgtgaattaaaagtgttttttttttttttttttttttttttttttttttttttttgagatagagttttatttttgttgtttaggttggagtgtagtggtgcgattttagtttattgtaatttttgttttttagatttaagtaatttttttgttttagttttttaagtagttgggattataggtttttgttattaggtttagttaatttttgtatttttagtagaaatggggttttattatgttggttaggttggttttaaatttttgattttaggtgatttatttgtttcggttttttaaagtgttaggattataggagtgtgttattatgtttggttaattttatatttttagtagagatggggttttattatgttggttaggttggtttggaatttttaattttaggtgatttatttatatcggttttttaaagtgttgggattataggtgtgagttatcgtgtttagtttataagtgtttttaatggtatttagaatgatgaatgttttttaaaagatttttaatgtattttgtttagatatgttagaaaaattattatttattgtagttataattttataaaatttatttttaaataataagatttgaaagttgaaattattttttgatttataggttgtagaatggatattgtgttattaagtatgaaaataatatttatttttttgtatttttgtattagagtttttgggtggttaattatattgttaatgagtagtaatattttgaaagaaatttttttttttttgagtagtaggttttttaatagtgggtttaaaatatttaataaattatgttgtaaatagatatgttgttatttaagttttgttgttttatttataaaatataggtagagtagatttagtataatttttaagagttagagggtttttagagtggtaaatgaggattagttttaatttaaagttattagttatattagtttttaataagagagttagattgttttttgaagttttgaagttaggtaggtattgattttttttttgtagttatgaatgttttagatggtttttttttttaatataaagttattttatttatatggaaaatttgttgtttagtgtagttatttttattaattattttggttagattttttggataatttgatgtagtttttttattattatttgttgttttatttcgtatttttatgttatggagttggttttttttggtttgggtggtaaggagagaaggttggggtttgtttttgatatataaattattttttaaaattttaataataataaattaatattgtgtttgtgtgtgtatgtatgtgtgtgtgtatgtgtttaagagagatagaaaataaatgttttttattgtttgaagttatttatttttggggtaatttattatgtagtaatagataataaatataatggatttttattaaattttaaggtttgttttttttaattaaaaaatgatttaaaatatatgttatgtggtatatagcgtatttaatttagtggttttgtggtattattttaaagaaattagtagttttatattagagtaaattaaagtgatgtataatgtgaggtttggaaagatagtttatgttttttaagatattgtgaatatagaaaataaatagaaattgtaagtaggaattttatataggaagttataattgtgagtattttaaattataataattaatttgttattcggttgttttttatatgggtaattttatagaattattttaaggtttattataaatatatttatttatgttagttggtaatcgggaataatatagggtttagttagtttttgatataaaaatattattaatttgttgtgggaagttagggattttgaatggagggattagttggagttaaggtagaagaatataaattgtgaagattttatggatatttagtagttttttaaattaatatttttataattttttatatttgtttttattgtaatttttgaatataaattgtgaagattttatggatatttattatttttttaatatttttataattttttatgtttgtttttaattttttaattttattatttttataaattgagaatgtacgttattttaggattattattgtataaattggttgtagaatatgtgtgtttgaataatatgaaatttgattgtaaaatatgtgggtttgaataatatgaaattagtgtattttgaaaaagaataaagtaatagtaattttgaggtaataagaaaagataattataaagtttgattgtttgtagggttgggtagaatagagttatatttttttttttgtagaaagtttataaatagatgtgcgaggagaaatatcgttgaattttttttttaggaaggaataattttggggaaggaatgtatttttcgggggaggtttatagatggttgttttgggagtgtttgttttatgtggttgagataaggattgaaatatgttttggttttttgtagtatttttaggtttattaggattgggaaattttagtttggtaaattttagttagatcggttttttggtttcgaattttgttttttgttaagatgtttattaaaataatacgtgtatagcgggatatagatttttattagtaattttaattttgttttcgttttgtgatttttattgtttttcgaagtatgtgatttttgtggtttattttttgttcgtatatttttttttttttaaaatttttaataaaaatttgttggttttgtagttcggggttgttattacggttttattagtatgtgattttatcgttggaggtttagttgtaaaatttttttttttgtattgtttttttttattttttagattagtcgatattaagggaaaatagaaaagaatttatattgaaatattgggggttggttttttttataatttgtttttatattttatggggttttatgaaggttaaagtaaataatgtgaggttttggtaatataaaagaattatatagatgtattattgtgattatatattaattaagaaaggttagttaggcgtggtggtttacgtttgtaattatagcgttttgggaggttgaggtaggtagattacgaggttaggagatcgagattattttggttaatacgatgaaattttgtttttattaaaaatataaaaaattagttggatgtggtggtacgtgtttgtaattttagttatttagtaggttgaggtaggagaattgtttgaatttgggaggcggaggttgtagtgagtcgagattatgttattgtattttagtttggtaatagagcgagattttgttataaaaaaaaaaaaaaaaaaagttaagttttgttatggttaaaaaaatttttatttttttttttgagatagagttttattttgttttttagattggagtgtagtggtatgattttggtttattgtaatttttgttttttgggtttaagtaatttttttgttttagttttttgagtagttgggattataggtatttgttattatttttagttaatttttgtatttttagtagagatgggtttttattatattggttaggttagttttgaatttttgattttaagtgatttatttgttttagatttttagagtattgggattataggttttagttattatgtttggttaaaaattttaagatgtttataatatttaagatttatttttgtttatgttatatgtatttattgtaggttggttatggttttgtttatgttattttatattaggatttagatggtagagttggagtagtgataggtgttatgagaggagaaagagttatggagaattatatattggtttttgaagttattttttggaagtgatatatgttgtttttgtttatatttgattggttatagaaggttatatagttaaatttgatgttaaggagtgaaataaggtaatttttttatatttttgtattttttattgttttttttttttttttgatgttttaagattttttttttatttttttttgtttgttttaagagttttttttaggttaggtgtggtggtttatatttgtagttttagtattttgggaggttgagataggaagattatttgaggttaggagtttgagagtagtttgggtagtatggtgagattttgtttttatacgtatatatgtatatatatatatatatatagaaaagaaagaaagaaagagaaagaaagaaagaaagaaagtaagaaagaaagaaagaaagaattttttttagttatttttttagggtaggtttgttgatgataaattttttttatttttttttttttaagaatgttttgattttttttttatttatgaagggtatttttgatggttataggatattgggttgatagttatttttttttggtatttgaaaaaaatgttatttttttttggtttttatggtttttgaaaagtaattttttgttatttggattgttttttttttataaatattgtgttatttttgattggttttaagattttttagtttttagaagtttaattatgatgtgtttttgtatggatttttttgggtttattttgtttgggatttgtttagtattttgaatttgttatgttttttttttttaaatttaggaaaatttttagttattattttttttaatttttttttagttttattttgttttttttttttttttgggattttaataatatgaatgttagattttttgttatagttatatagttatgtttattgtggtttgaggttacgtttattttttttttatttattttttttttgttgtttagattggatgaattttgttgttttatttttaagtttattgagttttttttttgttttttttattttgttgttgtgtttatttggtgaattttaaatttttattatggtattttttagttttaaaatttttatttgatttttttttatattttttattttttttttgagattttttttttttttatttgttttaattatatttataatgatttgttgaaatattttttatgacggttgtttttttgttagataattgtaatatttgtgttatcgtgatattgatatttgttgtttttttttattttggttgagatttttttggtttttggtatggtaagtgatttttaattgtattttggatatttggatattatgttatgagattttggattttatttattaatttattttgagataaggtattattttgttatttagtttggaggagtgtagtagtgtaattttggtttattgaaatttttgttttttagtttaggtgattttttcgttttagttttttaagtggttgggattataggtatgtgttattatatttggttaatttttgtattttttgtagagatagggttttattatgtcgtttaggttgtttttaaatttttgagtttaagtgatttatttaatttggttttttagagtgttgggattataggtgtgagttattgtatttagtttttggattttatttaaattttttattttattaagtttttttgatattatattaatagaagggtgtgtgtgtgtgtgtgtgtgtgtgtgtgtgtgtgttagggggtgttgtttggtttttgttgagtgagaggtgaaggtttaggttttttatttggtttttattggtgggggtaggaaattttagttttgttgggtgtagatgagtttttgggttattttttaggtttttgttgatattattttggttaggagcgggaggggtattattagttatgtggttgttattgataatttgggggtaaggtggagggatagaggttttattattattggatgatggtataagttttagttttttttttggttttttttatttagaaggagtgagaggaatattttattattattgagggtgaagaggaaatttaggattttatgttgtttttattgatattgtggggtatgttttttatcgttagtgtgaataaatgtttgggtttttgagatatttttttagatttttttttatgtttgacgatttatggttttaattggattttttaattgtttttgtggttttatttagaagtgatttagtatgtatgaggattattttttatatttttatgattgtaattaattagtagtaagtatttattgtttagttattttttttttttttttaaattatttttggaaaattttagttttagaattttttttaagaggttgatttgagtataataagattttagttttttttttcgttagttttatatgtgaaaaattttttttttattgtaatttttttgtttttataaattggttttatttgggtagtaggtaagaagaatttattggatatttatagttttaatagttttaagttttattttttttaatagtaagtaatttgtttattaatatacgttttattggttttttttttttttttgttttattttttttagttttttatttagtgttttttttaaataaattatttatatttaagtatttgttttaggatgtgtttttggagaaatttaaaataaaatagtaatttttgtggttatttatatttattaatggatatttaattatttattttttttttttttatttatttatttttgtatttatttatttatttttgagatatagttttattttgtggtttagtttggagtatagtggtatggtttattgtaatttttattttttaggtttaaatgatttttttattttagatgtttgagtagttgcgattatagatgtgtattattatatttggttaattttcgtatttttttgtagagacggggttttattatgttgtttaggttgtttttaaatttttggttttaagtgatttgtttattttggttttttaaaatgttaggattgttagaggcgtgtgaattatagtaattttattttaaataagagttgggtaaaataaggttgaaatttattgggttgtatttttatatggttaaggtattttaagttataggatgagatagtaggttagtataaaatataggttataaagatattgttgataaagtagtttttaataaaggagttagttaaaatttattaaaattaaaatggcgatgagagtgatttttggttatttttattgttatatttttattagcgttatgatagtttataaatgttatggtaatgttagtaagttattttatatggtttaaaaaggggggttgggtgttttggtttacgtttgtaattttagtattttgggaggtcgaggtaggtaaattatttgaggttaggagttcgagattagtttggttaatatggtgaaattttgtttttattaaaaaaaatataaaaattagttaggtttggtggtgtacgtttgtaattttagttatttagggggttgaggtagaagaattatttgaatttgggaggtggaggtggtagtaagttgagattttattattgtattttagtttgggtagtaagagtgaaattttattttaaaaataaataaataaataaaataaaaaataaaaaggggaggtatgaataatttagtttttgtttagtatattattaagaaataattataaaaacgggtaattagtcgtttttagggttgttttatggagtagtcgtttttgtaattttttatttttttaataaatttgtttttattttgtattgaggatttatttagaatttttttttgtgcgaaatttaataatttttttttggggtttggattgagattttttttttgtaataggattatagtcgtgcgttattttatttggtttttttttttttttttgagatggagttttgttttgtcgtttaggttggagtgtagtggtgcggttttggtttattgtaagtttcgttttttcggtttacgttattttgtcgttttagttttttgagtagttgggattataggggttcgttattacgttcggttcgtttttttgtatttttagtagagacgaggttttatcgtgttagttaggatggtttcgattttttgatttcgtgattcgtttatttcgtttttttagagtgttgggattataggtgtgagttagggcgtttggttttatttggttaatttttgattttattttgtaaattgtttttggagttttttttaggtgattgttttttgatttttttattttgtgaattagttttttatattttttttttttagtagtttagaaattttaggttttaatttttttgtgatataggagttaagaagaaattatttaggtagatagtgaggttatcgaagtttttggtaaggttttttttttaatggaaagtaggtttaaattatttttttttttaataaagagtagtttgtaaaatcgggttgtagatatagatgacggtagttgtgttaatcgtgtttaaaatggcggttttattattttttttttgttagttataggtgtagtaaggagtcgataaaatggtatttttcgagagagtttatttgtataataagtttagggtggggcggttagtttttttagttatgtaaataaatatttgattaaattaatttgtgagttttaagtaaattagacgtcgtttttttaagttggattataaattcggtttatttgtttttagttgttttttttttttcggaagtttttttttttattagagagagagttgttttttttttttttttttttgtttattaaatttttttttttaaatttttcgcgatttttcgcgtgtgttcgtgttttatatttttttggtatgggatggtaaatttcgggtatttattttagataattggttgttttatttgtattggattttgagggtcggggagatttttgatttttaatagggattttattattgtaagttttttttggagatttttgatggtttaggtttagtttatatttattgtgagagtaagaatttgagtaatgtatggatggatttttttggaaggaaaataatttttatggatttaaattatttttataatttaaatgtgtggaaatataattaattatgaattttttatgttttagtagttaagtagttataaaattaaagtaaagtagttataggtataaataaaagtataaagataagtttaatattaatgtaataaatagtgtttttttgaaatgaagttgttgttggtaatagattatgtattgtttgatgaaggttttttcgtatttggtataatattttattgtgtgtttggcgatgatttaattttttttttttttatgtttgtttaaattattaagaaatttttgttagaatttgttttttggtttttatttggtataaatgcgattaagataattaaagttataaataggtaaatgtaaatgtaggtatttataagtagggttaggattagttataaatgatttaaaatatgtttataatattttttaaatgttattaaggaaagttagatatggaatttaatagtttttataggtatttataagtttttaggagtttagagattttagtttgagaatattattttagtattgattttgatttttagggtgattttgaggtaagtatttattatttttggatttttgtatattttttgtatataagaataatttgggttattagtgtttttgggagataaaagaagttagaggagttaatgataatgttttaagatgtttaaggattagagagaaaggataagaatgtattatagatttttagagttggaaaaagaatggtggttgagattttttagtttagttttggttttgtaattaaaaagatttagatttgggttaagtattgtggtatacgtttgtaattttattatattgggaggttgtggtagaaggatcgtttgaggttaggagtttgagattagtttacgtaatatggtgagattttatttttattaatttttatatataaataaaaaatggttgggcgtggtggtttatgtttgtaattttagtattttgggaggcggaggcgggcggattacgaggttaggagtttaagattagtttggttaatatggtgaaattttgtttttattaaaaatataaaaattagttgggtgtggtggcgggtacgtataattttagttatttttaaggttgaggtaggagaatcgtttgaattcgggaggtagaggttgtagtgagtcgagagcgtgttattgtattttagtttgggtaatagggcgagattttgttttaaaaaaataaaaataaaaaataataggatatgatggtgtttgagttttagttatttgggaggttgaggtgggaggatggtttgagaggttgtattgagttataattgtatttttgtattttagtttgggtgatagagagtttgtttttataaaataaataaataaataattgagatttgaattttagatttgttatttattgtgtgtgtatgggggatggggatggagagtaatttttttaatttttagtttttattttaagtgggtatgttttaaaatgttatattatagaattgttgtgtgggttaaatgagatggttttggaaagcgttgagagtagagtttggtttatagtaaggtttagggattttaagacgttgttgagaattttataggttttttagtaaaggataatagaaaagagaaagtgaagattttaatattttgtttataaatgataatattttttatatgtgtaaattaggttattgtattttaaatagtttcgtagttgttttgggtttttagttagtttttttgattttttttttgggtttgttgttttgcggtgttttttgttattttttgtttaagtttgaattttttttttggtcgtttttattttttttttattttttagtaattggagttggttatttgtgtagtaagcgtttttaagtggtttttttgtttattgttcggattataaggtttaaagaatatttcgataagtttattaaggtcgggttttcgtagaggtaggatttattaggtttagcggtcggtttagggtcggtttagtttggaggtttagggagttattttatatttttttttttattttggaagattgagatggaggaatttaggggaagttttgggtaggaagtagttatttgttattaagtggtaattaaattgttattgtaatttaaggtaaatcgtagtttttttgggtttagttttttttttttttattttttttttggcgatagagttttgtttcgttatttaggttggagtgtagtggtgtgattatagttattgttatttcgaattttggggtttaagttatttttttgttttagtttttgggtagttgggattataaggttttttttttatgagagttttgttttatttatgttagagggttttgaggaggtaaatataggatggttgaaaatgttagtaaaatatttaggatgtgtattgttgttttggttggaggtttagggggagtattatgggacgtatataggataaagtgggattaatttttttttttttttagttattattttgaattttgtattttatatgttgttgttaaaaattatttttaaaagaatataaatttaaatatgttattttttagtttaaaattttaaggttttttttttttatttttagaataagttaaattatttaatgataggttttaaatttgtttttttggttttatttatgggatggattttttttttaggtgaggttgtatttggatatagttatatttacgtttttttgttttggttttttcgtttttttggttaggaatggttttgttttatttttgtaaattttagtatgatttaaggtttagtttaagttttagtttttttttgaggtttttttgagttttgttttttgttttatttaggaggatttggttttttttttttttgggtttttatgattttttttagttttgtttgtagtacggtgttttgttttttgtgattatatatatacgtttaatattttttagattgtaaaggtttggaaggtggggagtgggttttattattgaatgtattttttatagttttttttgttagagttttgttttatgtaaatttttttatttttatttatttatttatttatttattttgagagggatttttatttttgtattttaggttggagtgtaatggcgtatttttagtttattgtaatttttatttttcgggtttaagcgatttttttgttttagttttttaagtagttgggattataggtaatcgttattatgtttggttgatttttttgtatttttagtagagatagggttttattacgttggtcgggttggtttcgaatttttgattttaggtgatttgtttgattcgggttttttaaagtgttgggatgataggtatgagttattgtatttggtgttttatgtaaatttttattttattattattattttttgagatagagtttttttttgttatttaggttggagtgtagtggtgtgattttggtttattgtaatttttattttttaggtgtaaataatttttttgttttagttttttaagtagttggggttatagacgcgtattattatatttagttaatttttttttatttttagtagagatggggttttattatgttggttaggttgattttaaatttttgattttaggtgatttatttatttcggttttttaaagtaaatttttaataataattgttgtggaatgatttgggaggtggtatttagagattttaagtgatatatgagaagtttatagagagagattatgtttagtggagtttggatggttgtttttattagtgggtttgtattttatagatgttattttattattttttaaatagattttgggttagtgattattattttttttttattgatgtagatttagttaagagaagttagatgttgagtcggaattttaatttttttttttagacgtagagttttgttttttttttttttatttgatattttgtttttttttgtatgttgtgagaggcggttttattatttttttttttttttttagtttttttaagtttaatttattatttttggttttgggattatagtttttaaattaaggattgtttgaatattgtttgataatgtttttttttttttttttttaggtagggttttgttttgttgtttaggttggagtgtagtggtgtaattatggtatattgtagttttgatttttcgggtttaggtgatttttttatttagttttttggtgcgtattattatatttagttaattttggtattttttgtagagatggggttgtgttatgttgtttaagttggtttcgaatttttgggtttaagcgattagttttttttggttttttaaagtgttgggattataggtatgagttatcgtaattggtattattgttattggtatttaagaggtgatggtttaggttttgaaattggggttgtttgtgaaaattgagagtattttttgtttttagatattttttatggttattggtgtaattggagggaagttttcgttatatataatatttttgagatagttaattaagaaattgggattttggttttttttagggtgtaaaattttgggagaaggaagtgaatttttaggggtttagaaggagtttttaaaggatttttgttagttaattttaatttttttttttttttgtaaattagtttttgtttttgttttttttttcgttttttttagattttttttttttggagggtttgagttttcggttattatttttaatgtcgttttttgttttttttgtttttttttatttttttttgtttggggtttttttgtttggggtttttttttggttttgttttatagtttttagttttttttttttttttttatagttaggttgtttagtttttttttgcgggggtttagaggttcggtgaggggagcgggatttggttgttatggttatattgaagttagtcgtagttggttcgggtagttgttttttttgggttcggggtttcggacgttcggataaagttaggtagcgttggtagttttagattcgattttaaaggtttgagattggggtgattgggatttaagagaattttgagttggaggtgagaggggggaagttagagatgaattgggagggtaggagtgggtattggagttgggttttttttttgtgggtagggattaggcggttttcggttggaggttggaggtgtgttgggaggaggggagcggtttagagtttggtagggaggaggggaaagagagggaatagagttgggtgttatggtgtggtgaatgggttgagggattagggtgtttttaaagggggatcgttgtttagaaataggttagattttttttttggtttttatgtttttatttgtttcgtaggtgttttttttttttttagttttttatattttttattttttcgtgttttttagttttatattttgcgttttagttttttttttttttttttttattttttgttttattttagttttttttttttttgtttttgttttttgtttttttgatttgtttgtttagtttttaagtttttttagttttttgttttttttttttaggagtttgtttttaatattgtttttttttcgagtttattttagtttttttatttagtttagtttttttttttttaaattttagtttttttttttgagtttttggggttttttattttttgttgtgtgtgttttgtttttattttttttttttttttttagatttgtttttttggttttgattttagtttattttcgtttttttgggaatttttttattattgtttttatttgattattagtttttttttttttttttggttttttgttttttttttttttaattatagttgagttgttttattttttttttagagttacgttattttaattttttttttcgttttttggttttagtttttagtttatttagtggtattaggtttgatttatatttaaagttttgtatatttttttattttgttttttattcgtcgttttttattttttttagttgttgatttagtttgtttttttagaggtagttgtagttttcggaaggggattgtagttagtgtatgtgtgggggtttatttggttcgttttttcgttcgttggtcgtgttgggttttttttttgtggttaggtggtttgtaggtttgaagttgttttttttttttttttacgtgtttttttttatatttttttagttgttttttatttttttttttttgggtagtaggttgttattggtttgaaggggagggaagtttaggatgggaggagatggtagagggttatttgggggtttttagggatatagggggtttttggggttcggagtgatgtaggagatgtggaatgggttttggggattacggatgggtaattaggtttttttggtttttggtgttgttttttgggttttaggatggttgggattttttttttaggtttttgggaatttcggtttcgagtttcgtattttagttggttttagtttttttttcgttgttatttgattttattgggttttagttttgtattttttttatttttttagtttggagttggggcgaggtgggtattattattaggaattttttttgaggtagtgagaagaggggataaaggttttaggattttttagttttttttgttttttttagtggatttttttgtttggtattgttatgttatttagttggggttagcgtgggtttggggtgtggaatgttttattagggtatgataggttgtagtttgtttggtaggtttgttggggtttttttagagtatagtttttggaaggaggggttgtgggttgttaggtgaggtgatttgggaagttttggttttatttttaggttggttttatttttagtttagcgttttttgggtttagattttttagttgttgttttttggaggggtaggtgttttgggggaatgaatttttgggggtttggtgggataggaaggcgggaagaagttgtttttcgagtgattttggggttgtttgttagtaggttttttagtcgttggaacgtttttgggtttttgaattagtgtttatgtgtgtttcggttttttttaagggttagtttttttttggtagtgtttttgtgtatttgtttggttgggatttcgtgttttttttttgggattgttgtttgggattgtaagtagggtatgtttttatttattgtgaggtttttggggcggagatgtgtagtggagcgagaattttttgtgatcgtgatattgtttaggtggtgagtaggtgtgggggtgtggagagaggtgaggggttgaggtagtgttgagtggggaaaaagtattttttattataagttgttttgtttcgttttattttttgtttagtagtttttttagttgttttgtttatttagttttattgttttattttttttgggttttttggtttttttttttttgattgtgtgtgatttttagtgtgtttttattttttttttgtttttttttttttttttttcgattatttaattttgttttggttttatttttggttttttttggttagtgattagattttttggtttattacggttagagttggttgggtttgagggaggtttgttttgaggatttttgagttttttttttattttatttcgttgggagtttaggggaattagggtttgggcgtttggattttcgggttttttagaacgttttttagagagaggaattgagaggagaaggagaagagagtgggttcgtttttagggtttggggttttttaggttgggtcgtaggggcgggagcgtataggttgcgagagaggagtaaaggttggtggagggagaagagtagtttggggtttggttggataggtgagttttgagatttgagttttgtttttttttttgggttaattttcgtagttgggttgggtcgagtttgtgggaatttgtttttttttttgtgttttggggttgtttttttttgttttttttattaggaatcgattttagaagtaggaggggcgtttttttttcgtgggttttgagcgggattgtagttagttttttggggcgttagttttggaggttttcgtttggggaagcgggggtgggttgcgagtgggtggagggggttgggcgcggagtcggtcggaggtagcggcgcgggcggttgggcggtttgggagcgtttaggcgggtttggcgggcgggttatttgggggaggtcgggtcgggcgttagcgcgcggggtgggcgtggcgggcgcggggtttggagttcggcgtcgggcgtgggagttattgggattattgggttcgggagggggaagggagggttgcgagttcgaacgcgcggcgagaaggtcgaggggagggaggggagcgaggagcgggaggaggaagggagggagtcgaggcgagggggaggcggcgtttgggttcgagtcgttttagttttggttttttttttcggaataggttttcgatagttgttttcgggagtcgtttttcgatattcgagtttcgtcggcgtttttcgttttcggttttcggtttttggtttttttcgtttttttcgtttttcgtttcgtcgtcgaagaggtttcgttttcgggtcggacgtttgggtttgtcgggaagagcgatgagaggtagggagagcggcggcggaattcgcgggcggaggtttggggtttttggggtgggggcgcgcggcggcgtttgtagggcgaggggcgggggaggtaggacgtttcgagttatgtttggtcgtttagtttttttaagtttttttgttcgttttttcgatgttttggtatatcgtttgaaaatcgggggcggggattgggtggaggtgaagttcgtgattttttagaaagagttttgagtttttagttttgaggtaagtttttttttatttagtgcggaggaattgagtttcgggaggaggtgtttttgtgtagttttattgagttagtttatttatcgtttgttttttatttggttagtttttgcgggtatttaattgttaagttttcgtttagttaatatttagttggttagtttggttatagtttagtaaaaagagggattgttattttaatttattagtgatattatttttttcggttggatggttaattagttttggtatgagagaatgttattgtcggtgagcgttagttttagggttttatttttttatgtttggtttttggttgaatatttttttttagcgtttttagtagttagaggtaggcgtttaagttcgttggttgttgttgagggtttgtaggtgtgtttaggattgagtggtgtggtggagataggtgaaaggggagtgagtggaaaggtagggaaaggttgttgtttttattgttattttttttatttagcgtttatttgttttttgttttttcgacgtttttttggtttggttatttatgtgtgttagaggttgggttttagttttttggggattttgtgtttaagggttcgggtgtgtgtgttttatgttgttttttggttataggagtatgtggtgtttgttattttatgtttataggtgtttgaaggtggttatttattgagcgatggggttggatttgaaggaatgttaaggtgtggacgggttgatgtatgtatgagtttttgtgtttgttttgttttagaaattttgtgagggttgttagggatattgagaggtgggtgtgtgtatgttatatttagtttcgttgtttatagttagtttagtaagtttgtgtgttttatcgtgtgtgtgtgtatagagttgtgtgggtgttgtttgagtgggatttgggggttgggagaggagcgtgaagggtttgaggtagggtggtttggtttttggtttgtttttggttgtaatggagtggaagggggtgggattggggaaggttttttgggtttgtttttttttgttttttgggtttttgattatggattgaagatttagtggagagagatgaggtgattgggggtgttggagaatagatagtttagacgtttttgtgttttttcgtgtttttttgtttggttttgtgtttcgtgtttttgagtttgttttatttattttttgtattgtggttttcgttttgttttcgtttgtttcgtattttttgtttgtttttgtatttttgtttcgggtttttttcggttttgtgtggttttgatgatttatttgggataggtatgaaggttatttaggggaataagagtttcgttgttttcgagagaggtggggttggagagcggtatttaggaattttaagttagttttttgggattttggtagtttgtttttcggcgttggattttaagggattaggcgtgatgttttttggttttagtttttgagtgttttttataatttagtcgttttttttagttgttgttttagagttttggggttttagttgttttttatatttttgttttagtgtattgtgggagtagttggaggaggataaagggatgggggagtattttttattttttttattttttggggtgatttgttttttttgtttttagattcgttttcgtttttaaggtaatttagtttttttttagttttttagaggtagttattttttggaagtgggaattggggggattggatgtttgggttttaggaaggtagagtagggataattgggtttaagatgttttgaatttgataagaggtggtagtcgagttttttaggattttagggtttggagattttagtatagggttttgagattagtataggttaggatagttttttttgtagtaggggaggggagagtagttatttgggtttgtaaggagatgttatttagaatagttttatgtggggtaagttttttgggtttgaggaatagagtagggatttttaaattttaatgggtataggttatttgggaattgtgttaaaaggtagattttgattgagtaggttaagggtgagtttgagattttgattttttttatgtttttaggtattgttgatggtttagggattattttgggtttagagggttataggggatagtaagattagaaggtgttggggttttttttgttttttttttagaattttggatttttatgtgggagggtagtagggtgagttggtttaggtttatttgatgtttaattttattatatttttaataaggaattgtttaattttttttgggatatatttattttttaaaagttaaaatgatttttatatttttttatatattttatgattttatataaatgtatttatgttataagatttagaaaaatagtataattaatttgtttttttaaatttgttttttttttgtttcgtttatgttaatttttgttatattgtattttattgttatattttattatatattttttttttttagacgtatatataggtatatatataaatatgggtgtttgtttattttatttttaaaaggtgggatattttttatatttttgttgtttgttttttatatttaatagatatatatggaaattatataaagttaggaatatattgtttttttgttattttttatagttgtatagtagttaataaattttattttttttaattttagtttgttttttgtgggtatttatatattttatagatttatgttttataaaaggtattataataaatatttttgaaatttttttttttatttttattttttattttttttaaagagatggggttttattatgtttattaggttggtttttaatttttggttttaagtgatttttttatttcggttttttaaagtgttggggttataggtatgagttattagatttagatttgtatatatgtttttattttttggtgtttttttttcgagggaatgttgggtcgaagaggatgtgtatttttaattataatagatattgttagattgttttttaaatagaagataatatttatttttgttattgagtatggtgtttttttttttattattttttattatttttatatgttatagttttaaaaaaatattttgttagtttgtttggtatttttttgaggttggtgaatttgattattaaaaaaaatgtttgttggtaatttggttttgtttttttgtgaaatgattatttatattttttggttgtttttttattgggttatttatatatttttttttgttagtttttaaggggttttagtttattgtagttattaaatttttttttgttgtatgtgttataaatattttttgtatatttgttgtttgttttaagtcgttgtttatggggatattttgtttatttttgattggagaaatggggttttaggaagttatttaattgatttttgttttagtttttttatgtgttaaatatggatagtaatagtatttattttatgaagtgattgtgaagataaaattatggattttgtttaagggtttaggttagtgtttggtataggggaagtattttaaaaatatagttgatgttgttaaataatgattgttgttgttgttttattgttattatttttaaagcggtttattttgtttgttgttgttagttatgatttagttttttgattaatttacgtattatttattttattttttgtagagatgttgtttttatttttttaggttcgagggattaggagttatgggattagaggttttgttatttttattgttgttgtttttggtggtaagtggagatgttgatatgaagggatattttgattttggtgaggagattgaattatgggtttttgagggttagggtttgggaggtagagagttgggggttttgatttgttatatgtttgttttttatttagttaagtgtcgttatgttttgggtatgtaggatcggattattttagatagtgatatttttgtttttagtttttggttagattttattgtcgttcgttatagtaggtatttggtatatttggtatatttgtagttgtttcgagaggagtttttgggatttttattttttttttaatttttttgtttatgttagtgaaatttttgtaggttgagggggtaaatgaagtggggtttaaatattggagatggaggtagatttggggttagatgttttttgtgtttttttttatttttaggttggagagtagtgacggggatggggtttggtgtttcgtagggtcggtgttttttaaggaggaggagtatttgtaggtggatttataacgattgtatttggtggttttggtgggtatttagggacggtatgtcgggggtttgggtaaggagttttttcggagttatcggttgcgttattttcgggatggtcgtcgttggatgggttggaaggatcgttggggttaggaggtgagattggtaggggtagtatttagaggaggttggttttttttatttttagttgtattttaaatattatttatacgttgacgattttttagtttatattatttttagattaagttttttagttgagttttaaataatattgtaaatttggttattttttggatttttttatttagatgtttttttttttttttttaatagatggggttttgttgtgttgtttaggttggttttgaatttttgggtttagtgatttttttattttagttttttaaagtgttgggattataagtattgtagttagttatttagatgtttaataggtattttaaacgtacgtttaattttttaagttgaatttgatttttatttttagtttaaatttgttttttttttggtattttttagtttaggaagtggtattattattgtttggttgtttaggttataagttaagatgatatttttgattttttttttttttttatttttttttaaagtattagtagtttcgtttgttttatttttatagtgtttttgagtttagttattttttattattttatttttattgttttaggttatttgttcgttatttttagtttagatgagtgtagtagatgttaaacgcgtttttttgtttttgtttttttttgtttggagttaaatttttatttgggggggcggtatttagtggattttagagtatgtaaattagatacgttatatttagttgatatttttatgttggttttttattttgttagaataaaagttgagtttttagttggtgtaggatgtttagtttgatttggtttttgtttgtattatttgttttttggcgtttttttggttacgttgtttttttttttgttgttggaataagttagggttcgtttttatagtttttggatattttttttgtgtttgtaaagttttttttttaaataattataggtttttttttattttatttagttttttgttaggtgttatttttttagagagttttttttggttatttattttattgttttgtttatattttttgttttttgtttttcgtagttgttttttttgttgggattttagttttataagggtggggagtgacgtttattattgagaacgcgtttggtatagagcgggtatttagttaatttttgttgaatgaatagagggaatgggttgaaatgaaggggaagttgaggtaggggtgtagggttgtgaggattggggagaatttgggtataatgggatgataggtttggagataaatggatggagttaggtaaggagaagagggtagttgagtttgaagtttgaggatggaatattagagttgcgatagagttagaggttttagttgtagatttttattttatttatgtttggttgcgttttatagtgttgtgtgttcggtgttattttttatgggtttttaagtggttattgtgggttgggttagggagtagttggtgggtgggaagtaagatttgatttggattttattttatttattttttgttttttggtttataggtgattttaggtaatgaggattttgagggagtggtgttgaaggattttgggttttttatggttgttcgattggttcgtttttattttcgggttgatcgggttatgagcgtttgtttgcgggtagagttttatggttgtttttggaggggtgagtggtttagttttttgggaatttgttttttgagtaggggattggagggtggggagtgtggagaatgggtatttaggatttttttttttgttgggaagttgttattttgaggagggggttagttagtattgttttttttatgttaatgagttagtggagagatataagaagggatttgaaatttgtttaggtttgatgtagggatgggggatggagttttagtgtttttgatttttatttttttattttgttttagatggatttttgttttatatcgtttttgtggggtagataatgtatttatttgaggtcgtgtattttaacgattttatttatgacggatatatcgtgggcgggtaagaaaggtttttgtaggatatggagtttggggtgggagggaggattgtgtgtgtgtgtgtgtgtgtgtgtgtgtgtgtgagtgtgtgtgtgtaggggggttggtaagtagggtggggagtgagatggaagagttgagaagagggatgggttaggtggggttttaaagggtagtattagggtgattattagttcgtatgatattgtatgaaaaaggtatttttttgttaatatatattgttggaaattgttgtaataaatatatatattatagattgaaatggtgttttttagaggtggtgtttttgtgttggatgtgatttgtaaggtatttgtagtgttggggtggggtggagagaggagaagggttagttgtatgagtgtgaggtgggatgggaatgggattagtggatgggagttaggttggttatgttattgtgtcggagggtggcggagtagaatgtttggatgttaagattttttttttttttaatttttttttttttggtttttttttttttagattgtagtatgggggtttgggttagttggtagatggtgtggtggggttggatgattttaggaagagttaggagttgcgggtttggttaggttatgattatgtgggatggagtaattatagtttttttagtggttatgtggagatggagtttgagtttgatcggttgagggttttttaggttatgtaggtgagtgagttcggttttcgaggagggttttgaagttatgtagggtgtcgttggggtgtttttattatttttagttttgattttgtgttttttttttttttttttaggtttattgtaataatatgtatacgttgggagttcgtttgtttggcggggtggaatgtcgttttcggcgtggttttgttatggtttgggagggggagtttatgcgttataatttagggggtaatttgggggattttagagttcgggttgttttagtgttttttggcggtcgtgtggttcgttttttgtagtgtcgttttttttttgcggggttttggttattttttagcgaaattttttttatttttggtaagttttggagtagtttagtttttagtttttgaaattgataattgattttatttttaattttgtagtgtttttaaaatatttattttttgtattatatttatttattatttatcgaaattttttaattaggggtgttttaaataatttgagtttttttttgttttttgttttttgcgtatttattttttttttgtaagttttttgttcgtgattattattgagttagtatgatagtattggttgttaaaatattgaaatatttttgtattagttgagaaatagttttttttttaagtttttagatatttgttttttatttttttataatttagtaattatagggttaatatttattatagttgggtgttttaggattttgtttttttagtttttattggttagtggttgtttattgagaattatttatgtttttgtttttttgtataatagtttattgtttttgttttttttgggttttttttttatttattttttttttttttttttgttttttttttttagatgtggtgaataattttttttcggtattgggaggtattttttcgttagttttttggtggtcgtttggtttattttttattaattttagtagtttgggtgagtaattttgggtgggcgtgtggattttttgtatttttttttttgggttttttttttggttagggtgggatttttttgtggtgttgattttgttgtttttattagagttggagtttagaggttagtagttcgtggttaaggtcgaggggagttcgatcgttatttttatcggttgtttggtggttattattttgtttttgttgtttattattgtttttatgttttggcggttgtattggcgtaggttttttagtaaggtgggtatagtcgtggtatgtggagtggcggggggaggttaggttttagtacgagttagcgtttagtgggatttgtagggtatagtttattagtattttaagaggagggtttagtaaagagattatttatattatgttaaagagggtatggggtttatagggagggttgttttttagttttgggtttgtttagcggagaggagtaaatattacgatttagaggagagagtttgtggagagggtattttgataggggtagtagattttggttttgggatgtagttggttcgtatttattttttagggagggtttgggagaatagatgttttgattttattttttgttttaaatttttgttgggtttttttttggttaatttaaattaggtttgttggtgtagtgtatattggttagttttggggtagaagtagggtagagataggtagagagtggggttggaggggtaaagggaagacgtttggtatattttaagttacgtttttcggttggagtttagtggtagtaatatatattaaggttgatgattggatacggtggtttatgtttgtaattttagtattttgggaggtcgaggcgggaggattatttgaggttaagagttcgagattagtttgattaatatggtgaaattttatttttattaagaatataaaattagttaggtatggtggttgatgtttgtaattttagttatttaggaggttgaggtatgaattttttgaatttgggaggcgaaggttgtagtgagttgagattatgttattttattttagtttgggcgataagagtaaaattttattttaaaaaaataaataaataaaaaaaaaacggttgatagttatggattgggtagatgagggttagaattttattgtgggatagggaagttatttttatgtttttgagttttattttttttgtttgtaagatggtgttgatagtatttatagttgtagggtttttgtgagggttgagggagggaacgtagggatggatatagtagagggttaggtcgtgtgtgttgagtaatacgggtgatgttttttatttttatgataaggttgaacggagggtgttggaagaggagttgacggtttatttttttgtttttggggatattatttttattaataatcgtttaggttttagagagttattttcgtattaggagtttcggtttcgtgggaattcgttttatttcgttttttgtgtttttaatggttttggtaagatttgttttgttttagtcgtatttttgttttttttgttgtttttttattgtattttttttttatttttttttttttttgttttttttagtttttatttgtttttttttttttgtgtttttggttattgtttatattattttttgtttttattatgtagttttttttaagagttttttatgtattatttatagtttttcgtggtgttattttgtttgtgttttatagatatttttttatttttgttgtatttttttattgtgtttttttggtttttttgttttgtattagatttattatgtttgtttttttatttattttttattatttatttttttatttatagttatatatttttgtatttatttattaattttttattatttgtttttttatttatatttataaatttatttatttatttatttatttatttatatttattatttatttatttatttatatttatatatttatttttttatttgttatttatttatttaataaaatatttgtttattatttatttatttatttatacgttttatttgtttatgtatttattatttagttagtcgttcgttattttgtagatttttgttttattttgtttgttttttaatgtaattattttattagttttggttttgttttatttaaggtttttttgtttgtttagttttgagttttatttttttttcgtgtttttttttttttttttttcgatagcgttgttgttttttaatttagtttatcgtttttttttggttatttacgttcgtttttttcgaggttcgggtttttttatattcgtttgggttaaatttattaatatttagggtaagtttttttgtttttgggtttcgttaggttttttatatttttattggggtagggaaaagtttttatattttgtatttttttttttttttattgtggtttattttgtttttttgagtttttaaggaggaagtttttgtgtttttagtttatttttgttgttgtttgtttttttttaaggttttttttttgagttgaggagtagaaagtttattggtttttagttttttttttttttttttttttacgttatttttttagttttttagagttagataggaggttgttgtggtggttttagattatagtaattttttttttattttttattttttttagagttgcgaggaggagggtttttatttcgggcgtttgtttttttttttatatgtgttttttttttgtagttttagaggtgaaggtttatgttttaattttttttatttgttttttttttttttagtgttgtttttttattgtggttttttttttagggttaagaggggatagttttgtttttttttttgtttgtagataatttgtgttggggttgtgagtagttgttatttttttttttttttgtgtgtttttgtttttgtttgttgttgagtttggtgtgttgggttgaaagggttgggagggtttggttttagggggagttaggttgaaagttacgggagagtagttaagtgaaggggagggagttgtggtgaacgggataagggtttggaaggtggagggtgtttggatgttgggattattttgaggcgggagaatttttggggaggaattttttttttagttaagatttattttatagttttttgagagattttagggaggttttaaaagagtaagattttatgatagttttgtttaattatatttattgttttgaaaagttttggaatagttaattttcgttttatgttagtgtttttttggtttgaggttggcgtatggaatattgggaagatatagtatagatttagttttttatttaatcgggagatatagggtttttcgggaggttgaggtgtggggaattatagtttttgggttgtttttgatgtttcgttttgttttttttttttttatttttgtagtttatagtggggattatatggagtttgagaagttaggcgtttcgtttttgtttttatttttttagaatagcgttttttattatgtcgaggttgatattgttattttgtagggcgttatcgggggtaatatttatgttgtgtttgtattgtttttaggggtagtcggggatgggttttttagagtggatttttttcgatttcgatttcgttttaaggagaagtttggcgagggttagtttggggaggtaaggagggtgtttatttagtgtttggttttattgtgtgttttgatgttatgtttgtgtatttttttagttaggaattttagttatttgtaatcgtgttaattcgtttgattttgtgatcgtttagtaaacgaatttttttttttaggtgtatttgtgtgaggtcgatagtttttaagatttggttagttttgattttttttttaatgtgcgtaagggatattttttgttggtagttgttaagattttacggttagatgttattaagaatgttaggtgaggattagggatggtatttggaagaagggaggggaggtcgtgaagagtggggagttatttagagagaataatggtagagtttaatagaggggtggtatttttgggaggggatttatatgtacgttgggggtggggatgtttggtttgtttgaggtggggtaggggggtgggggcgcgggggaaggtgtaggtcgtttattcggtatttttttttagtttttttttgttttttaggaatgattttttgaaagaggtgaagattatgtcgaggtttaaggatttaaatattattcggttgttgggcgtgtgtgtgtaggacgattttttttgtatgattattgattatatggagaacggcgattttaattagttttttagtgtttattagttggaggataaggtagtcgagggggtttttggggacgggtaggttgcgtaggggtttattattaggtatttgtttatttaggttgggttttgtttagaatttttttaggggattttttttttttttttcgttttagtttggaggaaaagaggggagcgtgggggtgggaagggagagaggttttaggagggtttgggataaggaatgtgtgataagttaatttaggaatatggatagaaaggttggaggtgattatgtaagagtggtgaagggatttgggttttgttatgacgttttttttgtttttttttatttttatttttttttgagtttagattggggagtataataaaagaagagttttttagtgttggttaggtttgggagattgagagggaagtgatttttggttttacgtgggtattttatttttatatggggagttagagtgatcgggttcggggagtgggttttttttttttttttggatgggaatttgcgaagttgtttttagtgattttttgtcggttttttttttagttatttaatgttgttgtatgtggtagtttagatcgttttcggtatgcgttatttggttatatttaattttgtatatcgggatttggttacgcggaattgtttagttggggaaaattttattattaaaatcgtagattttggtatgagtcggaatttttatgttggggattattatcgtgtgtagggtcgggtagtgttgtttattcgttggatggtttgggagtgtatttttatggtgagtagttcgaggatagttaggttggagtagggtaggtgggagaatattggtcgttatttatagttttggtttttattagttatatattttttttgggttgtattttatagaattttatttataatatgaggtttttttagtttaagggattggggaaagtaggagttgtagtgtgatgggtaagaatttaggagttaagagtgggtattggggatggagatagggtggtagagagtttaagagatgaggttgggcgaggaagttggagatagaaggggttgggtagggagatcgaaggttaggattagaaagtgggggtggatggagaggaaggaggagtagaaggaagaggtgggttagggttttggagagaggattagagtatggagaggaaaggtagagtttaagggagaggagttggaaaaggtggttagcggaggagagtggagagtttggcgttaggagggattaggtttgagtggagtttagagtggatttggggtttttaataggaagggaggagggtttacgttgtttgatgtttttgtttgtttttgttgttttttttgtattttaggggaagtttacgattgcgagtgacgtgtgggtttttggtgtgattttgtgggaggtgttgatgttttgtagggtttagttttttgggtagtttatcgacgagtaggttatcgagaacgcgggggagttttttcgggattagggtcggtaggttagagtggaggagagggaagatgggttcgaggcgggggatagaaggggtagagttgttattttggagattaaagaatatttgttttttgatttttatttatattgttataatgtaggtgtatttgtttcggtcgtttgtttgttcgtagggtttatatgagttgatgtttcggtgttggagtcgggagtttgagtagcgattattttttttttagttgtatcggtttttggtagaggatgtatttaatacggtgtgaattatatatttagttgttttttttttagggagcgatttaggggaagttagtgatattaaaataagaggatataatggtatttttgttttttttttttcgatagtttattatttttaatagaggtagtgagattgtaggtgggttgggtttatttagggagttgatgtttttttttttttttttggatatatttttatgttttttttttgttttttttttttagaagtttttgtcgtttatttagttggttttgtggatgggattttttttatttttttttagttattttttggggaagggtggggagaaatataggatagatattggatatggtttattggagtatttgggttttattggataatattgatttttggagaggtggttgcgtttttagtttttttttttttgttatatattggattttattggttgagaatttgggggtgaggaggataagaaggagaggaaaatgtttttttgtgtttgtttttgtatttgtttttagtttgggttttttttttttttattatttgaaatattggatttgggggtagtttcgttttagtttttagttatttttattttttatttgtagttttgtagttagaatttttttaagtttatacgtttttgtggagtaaatattgggattggggggaaagagggagtaacggtttatagttttggggttggatatttttagtgtagttgttatattgatttttttataattatttggggtttgtatatttttggggggagagatatagatttttatattaatatatggatttagtttgaggtaattttaattttttgtattaggtaggtaataataaaggttgagttttttataattgtgtgagtgggttttttgggaatttggtaattttgttttttgtatttttttttgaatttattttttaatttattttttatttttttttttttttgtttttttattttattttttattatttgttttgtttagtattgtgttttgtttttggataatttaggtttttgtttgtgggattttaggagatgtatgaatgtttgagtgtatgaatttttttaatttagaggggtgttttggtggaggtttggaaggaatgtagttaggttaggggtgttgaattttttttgtgttataaacgtttttggtagtttgtagaggtttattgagttttttttagaattaggttttaaaatttataaaatggattaggtatagtggtttatttttgtaattttagtattttgggaggttgaggtgggtagattatttgaggttaggagttcgagattaatttggttaatatagtaaaattttatttttattaaagatataaaaattagtagggtgtggtggtatgcgtttgtaattttagttatttaggaggttgaggtaggagaattgtttagaattcgggaggtgggggttgtagtgagttgagattatataattgtgttttagtttgggtaatagagtgagattgttttaaaaatagaataataataataataaaatttataaaatgtataggattataagggaaattaatggaaatagtttattaaaatgttaaaaaattatgaaattaatgtgttttttttttatgtatttaataataagatttaaaaataggtgtaataaattgatattttttaaatattaatgagtataagttatatttgagatttttataatagttatagtgagatataaaagtagttgtggtgttaattagtgataagttataggtattgttaatattattggtggttttatttatatttataattggaggaaatgttaaatttttattagaggttagtaaaaggtgtaattttttttttttgtttaaattttagaatttatttggttttttagggtttggaaattttaggggagaatttttgggttatgttgattaagtgtgtaaatgttttattgggggtaggggataggttgttggaatggaaattagaattagaaattagaattaagagttttagttattttagaggtttggaaggatgagttgtaattattaagagaataattaaagggtttaaatttggttggaaagaaaaaatcggttagtggggtggtttatgttttgtaattttaatattatggaaagttgaggtaggaggattttttgagtttaggagtttggaattagtttaggtaatatagtatattttggtttttatttatatatatatatataaaattagttgggtttagtggtgtgtattagtaatttaggaggttaaggtgggaggataatttgagtttaggaggttgaggttgtagtgagttatgattgtattattttattttagtttgggtgatagagtaagattttgttttaaaaagaaaattaaaagttagttgtagggatgggataaggtagatttattttgatggttatttatgtgaaataaaaattttggggttttggttgatgatatttataaaatgagttaattggataatgaggattatagtaaagataaattaatgtgaagttgaattaataggtttttggggtttaggtttcgaatttaatagttttgttaaaatttatataggttaaattattgtgtattatgatttaagttgtgtatcgataggttagagtttagaggttagattttagaataatgagcgatggaagttacggtagtgagtttgataatttaaatttttgagttgttttttaagtagaaatatttggagttaattttttttttttttttttttttgagatttggtttcgttttgttatttaggttggagtgtcgtggcgtaattttagtttattgtaattttcgttttttgggtttaagcgatttttttgttttagttttttatatagttgggattataggtgtgtattattatgtttagttaatttttttgtatttttagtagagacggggttttattatattggttaggttggttttaaatttttgatttcgtgattcgtttattttggttttttaaggtgttgggattataggcgtgagttatcgtgtttagttttatttgtagttaatttaaaagttaggttttgtttgtttaaatttgttttttttttatagtttattgatttagtgaatggtagtattatttatttagttgtataagtcgtataaggtggtattttcgagtttttttttttttattttttattttttaagtttagtttagtataaaacgttgttgattttgttttttaaatttttttggaatttgttatttttgtttttatcgtttttttggtatatgttgtttttattttgtttggatttttgtagtggttttttagttgttatttagatttgtttttgtttttttttgggttgttttttattttgtaattatagttatttttaaaatatataaatttgattttaattttttattttaaatttagtagtgattttttattaattttaaaatgaagaataaaatttttttggttaaggttggtttttatatatttttttagcgtttttttttattcgtttgtttttttttgtgggttattggtttttttttagatttatttaatgggttatagtattttttgttacgtggttttcgtggtatgttgtttttttatttggaataatgttttttgtagtttgtgttttattaatttttgtttgttttttagtagttttttttgatttttttaattaggttaaattttttattgataattttagaggatatgaattttttttttgtggtatttattacgtgtgtaattttatatatttttttatatttgttttttttattaaattataagttgtataagggtaaaattttggaatatagggtttaatattggttgaaagaaagaattgtagtaaatatttgatagattaatatagattttatgtagttatagaattagaattaggattaataagtgaaagttataataatgatgataatatattattgagtatttattatatattaggtattgaaattacgatatattatattttatttaatataataatatatgaagtagttaaaattattttgtatagagaagaaaattttgttaggttaagtagtttgtttaaagtagtagttagttaatagtaaagtttgtgggaagtgggtttgtgggtttttggttttttgtttttttttttttttttttttttttttgagataaagttttgttttgttatttaggttggagtttagtggtattattttcgtttattgtaattttcgttttttgggttgaagcgatttttttgttttagttttttgagtagttgggattataggtatttgttattatgttcggttaatttttgtatttttagtagagattgggttttattatgttggttaggttggttttgaatttttgatgttttgatttatttttttcggttttttaaagtgttgggattataggtgtgagttattacgtttggttttggttttttgttttttttttttaggatgttgtttgagaggaggaggttatgagttttttattataggaatttttttttttgaattattatgtttattaatatgttggttaatacggtgaaattttgtttgtattaaaaatataaaaaaaaattagttaggtatggtggtttacgtttgtaattttaattattcggaaggttgaggtataagaatcgtttgaatttgggagatagagattgtagtgagttaagattgtgttattgtatttgatttgggtgatattgtaagattttgtttttttattttttttaaaagaggtgtgtttattttaatttttttttttttttttttttttttttttttttttaatttgagatagatttttattttgttgtttagtttggagtgtaatggtgtgattttagtttattgtaatttttatttttagggtttaaataatttttttgttttagttttttaagtagttgggtttataggtatgtatttttatgtttagttaatttttttattttttgtagagatagggttttattatgttgtttaggttggttttaaatttcggggtttaagtgatttgtttggtttggtttttttttaaagtgttgagattataggcgtgagttattggattcggttttaatttttagtaaaagtgtatgagtatgtttttatattttggttaatattgaggttgttaatttttaattttttttttgttgaatttttatattttaattttatttatgtatttattttgagatagagttttgttttgttgtttaggttggagtgtagtggtgtgatttcggtttattgtaattttagtttattgggtttaagtgatttttttgttttagttttttaagtagttgggattataggcgttcgttattatgtttggttaatttttgtatttttagtagagacggggttttattcgtttaggttagtttcgaatttttgattttaagtgatttattcgttttagttttttaaagtgttgagattataggtgtgagttattgttttcggtcgatttatttatttttatttttatttatttatttattttgagatggagttttatttttgtttaggttggagtgtaatggtgtggttttagtttattgtaatttttgtttttcgggtttaagtgatttttttgttttagttttttaagtagttgggattataggcgttcgttattatgttagttaatttttgtgtttttagtagagataaggtttttattaaaatgttgattaggttagtttggaatttttgattttaggtgatttatttattttgattttttaaagtgttggtattataggtgtgagttatggcgtttggtttatatatttatttttaagagatagtttaattttgcggttaggttggagtgtagtggtgtaattgtagtttattatagttttgaattgttggatttaattaatttttttattttagttttttgagtagttaggattttaggtgtgtgtatatcgagttaattttttttttttttttttttttttttttttttttttttttttttttttgagatagggttttattgtatagtttaggttggagtgtagtggtatgattatagtttagtgtagttttgattttttgggtttaaataatttttttgttttagttttttgagtagttgggattatagaattaggtttggttaattttttgaatttttttttttttttttgagataaagtttcgtttttgttttttaggttggagtgtaatggtacgattttagtttattataaattttatttttcgggtttaagcgatttttttgttttagtttttcgagtagttgggtttataggcgtttgttattacgttcggttaatttttgtatttttaggagagacgggttttattatgttggttaggttggtttcgaatttttgatttcgggtgatttatttatttcggttttttaaagtgtcgggattataggcgtgagtatcgtgtttagttaattttttgatttttgaaatatttttgatattttgtttaattttttttttgttttggttaatttttttttttttttttttttttttttttttttaatttttttttttttttttttttttaatttttttttttttagtttttttttgtttttttttttttttttttttttttttgggatagggttttatattgttgtttaggttggagtgtagtggtgttattattgtttattgtagttttaattttttgggtttaagtgatttttttattttagttttttgagtagttgggatcgtaggagagtatattattatatttagttaatttttgttttgttttgtttttgtagcgatagagtttttgtataatgtttaggttggtttggaatttttgagttaaaatgatttattttttttggttttttaaagtgttgggattataggtttgagttatttcgttaggtttttttttttttttttttttttttttttttttttttttttttaagttgttttttgttgagtagggttaattagtaagtagtggtttgttttaatttttttattatgttttttttttttattgttttgtaatagttttttgtattttgtttattttattaattatttttttttagattgtaaattgttttttaattttatttaaagtttgttataaagaagttttgttaatttttagttgttttttgaagattttaaaatattaattgttaaaaagatagggataatagaaaatatgggtgggttataaagtataaaaagttttgtatagttattattattttgatttttggttgtttgtaaatgtgttttaaattttagtttgggtattttttgtttgattgtagggattttttttttaatttttttttttttagagatgggtattttaggttgggtttagtggtttatgtttgtaattttaatattttgggaagttgaggtaggtgggttatttgaggttaggagtttgagattagtttggttaatatgttgaaattttatttttattaaaaatattagaattagtcgggcgtggtggtatatatttgtagttttagttatttgggaggttgaggtaagagaatcgtttgaattcgggaggttgaggttgtcgtgagttgagattatgtaattgtattttagtttgggtgatagagtgagagatttcgttttaaaaaaaaaaaaaaaaagagagagagagagaaatgggggtttttttttgttatttaggttggtgcgattatagtttattgtagttttaaatttttagttttaagcgatttttttgttttagttttttaagtagttgggggttatagttttgagttatttcgttaggttgtaggtaaattttttaattttgtcgggttttagttttttagtttataaggtgggaataataaaatttgtatataggaatttggggaaacgtgtagttttgggtttgggtgaagatttttatttttgtagtaggtttataaattaaattagagtaaatagttggtgttttaaaaattgtatttatttgggttttttaagtaaacggtttgaggagtggtggaggtagaaattaagatttattgagtatttagggttaagtaaggtgtattggatcgtgttaatcgttaattcgtggaaatcgtttagagtgtgtacgtttttttttttttttttttttttttttttttttgagacggagttttatttttgtcgtttaggttggcgtgtaatggtatggttttggtttattgtaatttcgtttttagggtttaagcgatttatttgttttagtttttagagtagttgggattataggtgtttattattacgttcggttaatttttgtatttttagtaaagacgggggttttattatgttggttaggatggtttcgaatttttgatttcgggtgattcgtcgtttcggttttttaaagtgttaggattataggcgtgagttatcgcgttcggtttggagtgtgtattattttaattttatggggagtaattgtgtttattcggtttattattaagtcgttagagcgcgttttcgtaaggaagttttttaggtatttttattttttcggattcgtttttcgttttagtcggttatacgcgtcgttagtagcgtgggcggagttggttttgttttcgcggaattaattggtttagtttttggtgttttttttcgtttaattaaaagttagttttttttttttcggtttttttacggtgtttttcgggatttgtagttagacgcgttttagtcggttttgaggagagtaaaggtaagattttaatttttagtatttttcgcgttcggagagtgtagcgtttatttttattttttttatttttttatttttttttttatttttttttttttttgaattttttattttgggtttttgtttgtgaaatttttttttgttttttttatttttttttcgtatttttttattattttttttttaatttttaggagttaatgcgagattttggtttcgattaagcgacggttcgagattcggggtgcgcgaggaggatcgatagagtggtgaggggatttaggagggcgggagtggtagaggtatgagagagagagaggtgagtgggaggcgaagagtgagaggaaggtagggagaagttaggagatcggaaggcgtgggttagggtgaatgacgtgaagtagatttgggaagggaaaagaggtggttttagatttgggaagtatggaggggagaggttatcgtcgtatttagtagaagtgggttaagagatagaagataggaaggacgggtagatttggagtttgtagattggtttgattaggatgggatggaagagagaggtgtgggtttaattttttttgtttttgtttagttaaagatgagataagttattgaaatataaaatgattttgtaaatattggatagttaataattttgttatttggtaattgagggaagattggagttgaagggtagaaatagggtgaggaggtaagaaagggagggagattggttaggtttgggagaaattagaggagatgagtgatatgggaaaggagattatagaaaaggtggggttattgtggggattgatggatttggaattagttagaaaggttaggggtgatattggtatggatggtgaggttgtatttttgacgtttgtattttttaggtgatggagagtatttttttaaggggattgaatcgagtatatttataatgtaggaatttgtaggaatttttagggggtttgagttttggggtattggatcgattgtatgggtattttgttatatgtttggttgtttttaggtgagaagtttttttatggtagggaaatgtaatggggtttgcggagtggaataaaatattataggtaaaagtgtagtagtttggagtcggggtggggattgggggtaagggttggaaattgttttaaagtgtggaggttaaaatagtaggattggtaaagttgtgttggagtgagatgagatgtttgagaggtaattgagggtagagatgtagatataatgtagtttttgatattaatttttgatttttgtttttgtatagggagtttttatttttggttaagaattgggtgatgcggatgttttttttggagtagtttttgttataggttgttgtagttttgtgggtaaagaaggaatttagtaagtaagttttagttagatataaattttttaatagttatattttttaaattgttgttttttggagtatttttaggaagtgttaatagatatattataaaatttaaaaataaatatatttgggaaattttgtatattgtttttttttttttatttattttttagttgagattttgtttttaaatgtatttttttttttaaagagttatgtgtgatatttgtaatgaggttttgataagtaatgtagtaaagaatttgttttaggaagatattaattttattttgtggaatagtgttttaagggttagtaagtttagaataggtagagatggtggtttttatgggttttttttttgttttttaaatattttatttatttttttgtttttgttttagggtttaggaggaaagtatagggttgttgagcggttttcggatttggtatatatagttgtttttaggcgggttttagggttttatttttaattttatttttcgttagaattttcgtattgtttttttgggtgggtatgttatttttttttttttttaagttagggtaggggaattgttgtttattaaattattaattaaattttgggagggggagtttttgggggtttttttagaattttgtggtttttacgttgggaatttttttaggagtaagttggattagatgtagtgtgtggtgtaggaaatgttttttatttatggtttttgaggataagggtggaaagatggtagagggtagtaaggaatatagatagggttttttattttttttttgttgttttgttttgtttgtttttgagatagagttttattttgttattaaggttagagtgtagtggtgtaattttgatttacggtagtttttattttttgggtttaagtgatttttttgttttagttttttgagtagttgggattataggtatttattacgacgttaggttaattttttgtatttttagtagagatggggtttcgttatgttggttaggttggttttgaatttttgattttaagtgattcgtttatttcggttttttaaagtatagggattataggtgtgagttattgcgtttggttagggttttttatttttggtttattttggtcgtagggggaaggtttggtttgatgatataagttagttgggattagataagtatgttcgggacgtttttttttttgataagtacgtcgaggagcgatgggaggtaagtatttgggagtgtgtgtgtttttgtttgtgtttttattttttatggtttttggggtatggtttttttgtttttttttgttttttaggtggttttgtattttatggtgggtttttttagtgtagttgttagttaggatttggtttagttttttagttaggttgggtttatgaagaggtgaggaagtcggaggtatagtagttttttgttgtgttatttttttgggtttttaagaaatggtatttggggttagttaagattagaggatattagttggaaaaggtaagttgagtagaatatagttagagatattaagaaaaaacgtgagtggataagtggggatagtagtttttttttgtatattattattattgttttggtttttgtttttagtattgaatttggagagtcgttttgtattattttcgttggtttttagtttttgttgttggatatttcggtttagttttggtattttatgttgtagtatttgtagatagtttaggtgaggaggtagggttatttaattagtatgttttgttttttttaggttttattgagagatttttgtttatagattgttttttgatttttttttttttgtttttttttttttattgttttttttttatttttttttttttgtttttgtttttttttttttagagtcggggtatggatttggtagagattttttttttttttttttagtttagtttttttattttgggtaaggtaagtagggggttgaaaggtatagagatgggaaggggaaagtaagttgtggggtagtagagtagattgagaagataagaatgaaaatagaacgaatagagatggagaaagaaagaatgaatgtatggggttgggggtgggtgggttgtgttttggattttagttggaaatttttgttttttaggattattttgtggaaggtatgagtgattttttgttgaattttttgtaatatttgcgtgagtttgggtttgttttttagaggaaggtatgagcgtttagataagtggtttttagggaagaaatagggtggtgtgttgtttttgtttttaaaaaggagtggggttttggggtagtagtaggaagtagttgttagaattgaatatttgggtttttcgggggagagaagttgggggttgaggttttgtattttgggagggatttgatattttaggtaggaagatgtaaggtagtgatttttgagataaggtatttgtttttttattttttttagaggaaatttcggcgttattattttatacgtttggttattaattttttattaggtgtttttggagttgggggtattgtgtattagttaggttttattgtcgtggaaattaattatcgattgtatgtttatacgggtgaggcgggatagagggtttttggaagaggaggttgggggtgagggaatgttagtttatgttcgtgtttatttggtagtttatagagttttttgatattttttatgatatttgaaagaagggtttgagggagtttgggtgtgggggtggtttttttattttttttttatttttggtttagagtcggagttgtagattgtttttattgtttttttttttgagatgttttatcggttttttaatatggtggtggcgtaggtgattcgggagagtgtgtagtaggtaatcgttagtggtattatagtttagtaggtatttttatttgggagaggtggagtaggaagataggttgtatttgggttgcgggggataggggttatattatggaaggttagttttgagtttgttataataggtggtggtgagttgtttgtgtttgaagagaaatgaaggttttgggtgtgagaataggtagatttttgaggggaaaaaaatatggagggaggaggtatagatttggatttgtgtttcggtattgttatattttaattgcgtaaattagatatagttgttttgtttttgtgagttttagtttttttatttagtaaatgatagtttttattttagggttgtcgggataatttattggaagaataggggtaaagtattgagtttagtatttgttatgtaataaatgttaaaaaaagaaaatagtagttgttgttattttaaagaaagaaaaataaaatattattggaaagggcgaatgtgttagaaaaggaatattttacgttgttgggagtagtaacgtgggataatagttgaattgggataggtggagttgatgataggagttatgagtttttagaataagttgatgttttagtgatattaggtgatagtttagatggtttttttgtttttttgttggagtttttatgttatttttgtttgtttttttagataatttattttttaaggataagagtttatttagtgatgtttaaataggtatagataggttttaagatgttagaggttggtagttggtgatgatatgatggaaaagaaaaaggggtatttaaatttggggaagaaatagagggtcgggttgtttggggtagtattttgagtttttatagttaatttttgttttttgtagatatttgtgttgttttttattattatcgattagattcggttttgggagttggaaagggatagatttcggtttattgagggtgagtagtttttggtggttaagttttggttattggttagagaaagggtagatagtttagtttgtattttattttttattttatggattaggagagaaaagttggtaagatagttttttgttgttttggggtgagtcggtagtaaataaatcgttttaaattaatgtattttggatttggttaggtgagggaataatttatagtaatttgtattaggtttttttgaatatggttggattatattggtgttaagatgaatttttgagtagataagtatagagaattagtttgtaaaattgcggtgggggtaagtttagatcgcgtttagggttgttattaaggagttggggggatttttaataggagtttcgagttttattttttcgtttttttttcgcgtttttttcgttttgtcgattttaggtgttttgtataattagtttttgtcgtaagtggattttgagttgttgttggtttacgcgcgggagttgggcgtgttcgtgttcgagaattcggttaagcggtttatggtggtgatttcggtcgggtatagcgacgttaagcgtttttggaagcggtagaaatatagtttttgagagcgcgggatttggatacggatttcggcgggcgggattgggcggggcggggtattagaatttaggtgttttttatttacgcgttagggttttttttgtttaataaagttatgatagttagtagtgcggtttcgggcgttttttcgtggggtttgttttcgcggcggattcgtttttttggtttatagtttttggatcggtagggagagggtggggttaaagttagttgttgcgtatgcgtcggtcggggtttcgtttttatgcgtcgcgcggttttagggttacgttttagggtcgggtttggtggattttttagtttttgtcgtcgcggggcgttttgggatagcggcggggttttttggtgagcgcgcgtcggggcggttttcgggaagtgggagacgttgcgggttttgggtttaggttttgggatgggcgggaaggtttggtcgcgtcgggttgtgggtattgtaggaggtttttgtgtaggtggagatcgtcgcggttttggcgggattttttgttggtttttgggcgcgttgatgtttattatttttttgagtttttgagttttattttttatgtgttagtggttatcgtcgaatttagatatttcggttttgtttcggaagagttttgatattcgtggttttatggcgttgtttgtcgatattatgtattttagtttttaaggaggaaaggttttgtggaagggaatagagatttggaataatagatttgtgttaattagagacgggaaagatggaataaggggagtgatttttttttatttttatattttaatgtgttttttttttatttagaatagatttcggtttttttttaaatatttttgatgttttatttgtttttcgttttttttcgattattattttgggggttgaggtatttacggggtttttttaggttttatttcgtttttatatagtcggagttttatggattttttatttttcggaggaatcgtgaagttaaatagaagcgtttgcgagagaagtaggttattttggaggttgagatagtaggggagagtaaggttaggggttagatagtttgtttttgggtttttgagatttgggaggggttggaggagatcggttgaaatgtagtttggggtatattggattttagttttttttgttttttttttttagttatttgtagaatttattaaggtttggaggtttaaggagttagtattgtatgaaatttttacgaaattcggtgaaaagaaaggtaagtagaataagtaagaaggtttttttttttatatatgtgttgtttatttggtttgtcgaaatgtagtttgggaataagtttagtggttagtggagtttttttttgtttttatagatgtttttgggtttttgttttttgtatatagttttcgatatgttgaggttgtttggtattcgtggtgggtacgagagggtttttttaaattagaatattaggttagtatttggtagggaggggttttaaattgtttttaggatagagtggtttttgaatataattggattttagagttgagtttatattgtagattttgttttttttttggttttggtgtttttaaagattttttttggtaggttttttttggttaatttttttttttttattttttttttatttgtaggatagtttttttttgaagttttttttgttttggagatagtagagggtgttttttttttaatttaatttttttttgtttttttgattttttttttttttttaggttcggttgttttaagttataggggagattttttttatgtgtattttattttttaatgttattggttttttgtatattggttacgtatttacggtggttatataggatgttttcgtgcgttggtgagaggggagtgggggttgtttgagtttttggaagggaaataggaagggtaggaatgagtgaggataaatatttaagtttaggggtttataggagggtatttttgttgtaggtatcggatgcgtggggattaagtgttgtgggtttttggtttagattatgtaggaattgttatataagtatgttttttgttatttgtttttttttttgggtaaaagtaatttttttttttaaagtaatttgattttgtttatttgttttgaatttaattgtaggttgtggtggagaaataattgtggaaggaacggggagtgaggagatatgagttgagtcgggaggttttttttagggaggtgtggtagtggaaggaggcgtgagtatgatgggtaggattcggggggtttagatggtagatttggttttttgttttttattattattatttttgatttgtaatttttggtttttttcgatatagttttgatttttttagagatggaagttttggagtttgttaatatttggtggagtttttaagttttatgtgtgtggatattatatatgtattagaatattcgtgtgtgtgtgtgtgtgtgtatatttttatatatatatatatattttttttttttttatttattttaattttttttgtttaaattttatttttttttattttttatttttattttttaatttttatggaattatttttatttttttgggtttgttattttatgttatttttgtgaagtatttttggattttttataatatggttgttttttttttttttttatagaattttttgttttttttaatattttagaaaattttatattgggtttgtaagtttatttttattagtttttagaggttagattaatgttatttttatttgatttttttttaatatttggtattgttgggggtatcgttgggtttggtatataggaagtgtttgggaagtgtttgttgataaggatttttttgggtataggaaaggtggagagatttgtgagtagttgcgagttttgggtgtttttttggattgggatcgagagtgttttattatggatgttgtgagtgttttgtgttttggtttttgtgagtgatgggcgatgtttagggatttgtgtggggtagggaggtagtaatgtttgggtttttgagtagggtgatgggttgagaagtggtttttagaggtggatatttaggttattttagggttttttagtggttgtgattgaagtttttgtgcggttttataaggcggggttgttgtatcggaattattagtttgttaattggttatgtgttttaagattagttatttcggatattgaggtgaggcggagagagggaagtaggtttgtgagagttttgaggtagagtggttaatgattaagagtttagattttggagttagggtgtttggatttaaatttgatgtttgtttgttatagttgtgtggtttttggtaggtcgtttagtttttttaagttttagtttttttagtttgtaaattagagatgatggaatgtttgtatcgtgggggtgttgtaaaaattaaatgagaatttatataggtgtttggtaagatatttggttatggtttaagtgtttagtgaatatttattagaagtgtgattgtacgagtattgggtgagggtagagggaggtagttttcgaattttttaaatggtttttagatggattgtagggaggttgggtagatggatgagtggtagagtgaagtttgggtatgagttttgtagaaaggttgttttttgatttagttttttcggtgtttttaggtggagaatcggtttttgtttggttatatatagtttcgattgtttggttgttttattttcgtgttttttggttttttattttttgttgtttttttcgtggatggagagtttggtgagtatagtattttgtagggttattcgtttatttttattttttttgttttttgaagtttatgttgggttgttaggaatttattagtttattttttatatgtattttggtagtgtttattttagcgtgggtatttatttagggttttttgggggatgtataaaaagtgtatgtggttattgttttttgagagtgtggtgtgattttttaggagtgcgttatttaggaaagagattagttttaaggtatgttttgttttgtttgtttgtttgtttgttttgagatagagttttattttgttatttaggttgtagtgtaatggtacgatttcggtttttgtaatttttgttttttaggtttaagcgatttttttgttttagttttttgagtagttgggattataggcgcgtgttattaggtttggttaatttttgtatttttagtagagacggggttttattatgttggttaggttggtttcgaatttttgatttcgtgatttgttcgttttggttttttaaagtgttgggattacgggcgtgagttattgtatttggtttttaaggtgtggtttttacggtaaatgttttgaagagtttagagaaagggaagatagatgagttggaattgttagtggaagttttttgtaggagttggtgttttttttgaggaatgtatagtatttgtgattaggatattgagaatttttagtgttttttgggtatttagtaagaattttattatagttgttttaattaatgttgtttttattttttttatgtaaattattagggaattttttagtattagagatttttttagatttttggttattagtttatgggaaattttgggtttttataaatattgtttttatttttttttagttatttttgggggttttttttattttgattattttttgtttttttttttttttagttttattgtttttagttatgttggtagtgagaggtgaggatgatgattagttgtaagtgtttaaatgtttatttttagatgtagaggttgtggtaggaattataaggttagagacgttgtttggagatgtggttgtggtcgtttatttagacgattcgcgatatatagtaatatttagtgcgtttttgtattttggttcgtttcgttaatggttttttttttttttgggttttaaatggtggtttttttttttttgtttttattttttttttttgagattttttttagtggttttgattggatttttttttttttttatagtttttttgtagtttaggggttgataaattggtttatggttttaatttagtttgcggtttttttttttgagatagagtttcgttttgttattaaggttggagggtagtggtgtgattttggtttattgtaatttttattttttgggtttaagtaatttttttgttttagttttttgagtagttgggagcgtggtattatgttcggtacgtgttattatatttagttaattttttgtatttttataaaaattagtaattaattttttttaagtaatgtaatttttaagtaatgttatttagtagagacggagtgttattgtgttagttaggatagtttcgattttttgatttcgtgatttgtttatttcggttttttaaagtgttgggattataggcgtgagtcgtcgcgtttggttgtttgtagtttttatattatttatggttgttattatatattttttttagttttgttgtagtggtataatagagtaattgtgttgagaatgaatttgtttttaggtttaaaagtttaaaatatttatattttggttttttaagagtttgttgattttgttttagtttgttattttttattttttatttttttatttttggggtttttacgttttagtttagatttttttaatttttataggtgtttgtttttgattttttttttttttttttagtatttatacgggcgatagtttcgttattttttgatggggtagttttttttttttattatagattatgttgtttagttatatgtgggtacgggtgagtggaagttaggggagggagagaaagttgggggttttggaggagaggggagggaattaggaggaagaggaaggtgggagtgggagatttttatatagggtggtttgagtggggaatgggagggaggtatagatagagaaagtcgtaggggttggggcggtgtaggtgatgatgatatatttggaaaagtaaaagttaaggttaggtttagtatttattatggttgtgttttttaaggggtagtgaaggtgattttagtttatagttttgtcgatgttgagatgggggttcgatatggtttgagttttttgaatgttattgcggaggatgggattatgatttttttttgcggggattggttgtaggtggtattattttatgttattttattttttgggggttttttgtttttttaattttttttttagttttttatttttttagaggtttttagtttttatttttgtcgttttttttttagggtttttatcggtttgtggttcgggaaaagataatgtttgtgttgagtgaatggggtttgtttcggggtttttagaattattttatggtattgtttatttgtaggtaattttattttaatttttttattaagggttattttaaaagggaatgtatggagtttaagggtgataataggatgggttttgtattttttcgttagaatacgagtttcgtgtcggttttattcgttattgtatttttagtattaagggtttggtatggtatggggttttgtgtttttgggagaagttatagggtcggaagagtagtggatttattttgttttttttttagtcgttttggggatgtgatagaatatttgttgaagaattagtggtttgttcgttgttaggaaatgggggttcgagttgttaaggtgaggttgtagtgtaggaaggattggggttaggggttgggggagttttttgagaattggaatgaagaaatgggaagtaggagattttttgttttgaagatttttttagttgtggtaattgagaggatgtgtgggatggaggttgggcggtttagtaagggttggtttatatttttatttaagtttagaattttggtaagaggtttgggaggttttttttgagttttaaaatgattttagaggttattcgttttatttgtggaggtgcggtcgtgtaggaagggtaatattgtttaaagttttttttttttttaggttgtggagtcgggggttttggagtttagtttttttttttattagaagaattggtagtattggtttttttatattgggtaagggtagggtaaggggagtttttgtggagatggggaggggggattgattggttattttaagattttacgaatgttttttcggtagggattggtgtgtttttcggtagttgtggtggggttattagattttagtttatttggttgtagaggattatgcgtaggtgggtaggaagaagtattcggagggtcgagtgtggtatagagtatttagtttaggagttagagtttcgtagggttaagtttcgtttttgtttggttatgtgttttatgtttatagttatgtaattttttgcgcgattaaggttttttgaagtggtatttttttattttatttttgggggaatttggttattttaagattatatgaggacgtgaaaattaagtgatatttatatttgttagttgtttttttttattttttttaatttttttttatttttgtagggagaagaggattgttgggtggttgggcggttagaggttgaggttagagaggtagtagcggaattgatagggaggttaggggtagagttgattttggagaggggtgagtgtttgagttggggagggatgtataggggagcgggggtttgggtatttgggtttttgaggggaatagattttaagatatagaaggtagggttaggaaagttgggaatggagttaaaggggatagttttggtttttgggggtgggggttggtttagaatggtggtagtagtggtttgaggttttagaagttaaggttttaattgtttttattttttttttgttttttagattttgatgttttagatatatggtttttttttgttttgttttttttttttgttttgggttggttttaagaggtgaggtgggttgagagggcgaaagtgaaggggaaacgataaggaagggatggttgggtttttatagaggtttgaggggggtttggggtttgggttttttattgttttttttttttttagattttagattttgttcgtttttattttttgttatttttggaaacgggtagcgattttttgttgttttgggtgggtcgtatggttatgttggggatttagtttatagggtagttgttttttagtaaggtaagagttttttagtgttttgtcgttttttgtgattttagtgttttttaaattttgtttttttttttaatttttaatgtggttttttttacgttgttgattttttttttttaatttattttttattttatttttaaaagtatggaggttagagattttaaggtatttttaaggaaatttttttttgttgatttttttttgtttttaggtgtttttttattttatggttcgggataggtagggtcggaagatgagtaagtttttggggaatgtgttggatttaagagatattattagtggggtggagatgtaggtgaggacgaagtatttattagagggataaggtttgtagggtttgtaggagagaggaaggtaggttgagggaggagtgaggttagtaggtgtgatttttatagaggtagggttttcgatttgggtcgtgaattgtttttttttatttttaggtgttgtaggaaaagttgagaagcggaaatttggattttgtagagttggttattgtggttgtagtataggtgagttatcgttgtttgttttttattagttttagtttattatttttggttttttttgtaatttaggttttggttttgtagttataaaggtatttgttattttttttttttttttggttgtagaaaaaggattttttttacgggatttttgagtgtgggatagatgttttgagatttatattttgtttttatggagtttagggtaagtttgggcgaggggtgtcggggtgagtagagggtagcgggtatttgtgtaggggtagggtaggggtaggatttttggtgttgttgttatttatatgtagattatttcgattttttttttttagcgggcgatttgtatttgttagtttttgaggtttagagttgtcgatatttttgtaataagatttggaatgtttttcgttttatttttaatgttttaggggagaaatttgtgttatagtttgttgaggaggtaagagaaaatagaggtgtttgggagtagggtagttaggtgttagagggttaaggtggtatttggaaggaaaggaggtaggggagggggagttaggttattttgttttttttgtttgtagttgtttttttttttttcgatggatgtttggattttgagtcgttttgttttggttgtttaggagtgtgagcggggtttttttattcgagagttttcgttcgttatttatgttttgtattatttttggttttataatttttgtgacgtttatttggtgagtgaggttgggggaggtttggtatttttatgtttgtttttaatttttttggaaatttttaaggtagagagttttggagttaataagtttttaattgtttttttagttaggagaggagaggagacgagggagttttagtttttttttttttgggattggttttggtagtgtagtttaggtattgttgtttgtttgttatttggggagaggaggaggagggagatttttagaaatgtttgataagtcggtgttagaaggtagaggggaatttttttagtttttgtagttgttgagtttggtttatgggtaggttgcgtgttgagagaggtttgggagggattagtagcggtttttagattaggggtttttacgttgttttacgtttaaagtatttggagggtttgttgacggtggatttttttcgttttattgttattttagagtggtttttttagtaggttggggtgggggtgggtggtgtaatgaatatttattttttgttttaagtggtgttgttgttgttggttgtggattattgttttagtttagttttttaaaaatttttgttttttgttgataagtaaaaaatttaatgatttttttttttaaattatatgtttttttggaaattttgtttttgtgtattgtagagaattgttgttttggagtttttttttttgtgttgagtgtgttttgggattgtggattatattagaagtgttaagtgtttttgtttgttttttttttttaggatttatggtttgttttattggcgggtagtagtggttgtagggaggagggttgtggttttggatttgttttttgattattggttttttttttaggaggttgtgaagttcgtgttgtggtattcgtttcgttttttggggtttttttaggttttgtttttttgcgttgatttcggttttcgttttttggttttattgatgttttttttggttgaagagttttggtagaggttgttttttaggtttggttgtttttttgtttttagtatttcggttgttttttattttagcgtttgtagtttggtgagttttaagtattttggagtgggtttgtgggtgaatgggggggagtattttttgaaggggtttgttgtagggggtttatttgtaggaatggttcgtattttattgtggagttttggggaagatggattgtttttgtagggttgttgcgatgattttagggttttgagggatagtattagcgtagtgtttaagagtaggattttgttgttagattgttatttttgagttgtgtgatcgagttttagtttttcgtatgtttaaattaggaatagtaatagtatatgttatggttgtgatgagggttggataagttagtaatagggtgtttttaaaattttagtgtagttttaataattttagaaggataaatgttatgaatttatttaaaaattattttaaaatttaattatttaaatttatatttatttggttttgagttttgattaatttattttaaattttaatttatttttggttggttattttaattatagtaattaaataggtattaaatattgattatttaaaattttttaaatgacgttttattttttgttatgttttttgagatagtggattttttgtggtgttgaggatagattttattgttttaaggagatggggtggatgggtcgagaagagagttagtagggttggtattgagttttttaggagtttttttgttaattttgggttttttttattgttaggagtattggcgttagttagagttggagcggcgtttttttcgggtttaagaggtcgtgtaggtgttaagggtttttcgagttacgtattagtttattaaagttcggtttcgaggtgaggtaaggcgggttttgggttcggatttttgtaggaaaagggggttggtggggaaaagagtagagtttgaagggttaattttttcgttaggaggtgtagggtaggaagggaggtaggagttgaggttttgtttttgatagtttttttttttttagtgttgttgtagagtttagagtttggggattagggttttttcgaggtttttttggagtttttgggtattttgggttattgtggggttgtgggtttgttatttttaggcgtagtagtttttttcggttgggtttaggttttatttagtgatacggtttaagtttatatggagttgtaggtgattagaggggatggggagggttagggtaggtttgggaagtatgttgggaggaagggaggggttgggttttataaagtaggggaagggattttttaatggaggatggaggtttggtagtaggcggatgtttgagttttttttttttgtttttttttagggtttggtggattcgtagatttagttatttttgttagtcgttcgaaggtataagttgtagaagtagtttgatagttttatagttaggattttattagaaggggaggtagggatttagaggtaataaaaggtaaggttgagggaggtttttagaaggttttatttttgagggaatgtgggttaggaggggttttatttttggatttttattttttttttttttcgtttagtttttttttttttagttggaattgttaaaattggataaggtagttttttattttcggtagttgatggatgagtttttagttttagggagttcggagttttaatttattatttttattagttttttttttttttagatttgtttttgaggataaatagatttgttagttgttagggtgtagtgggacgttagagattatgtggtttatcgtttttattgtgtaaatgaggatatagattggtttggtcgtagtgattgtggtgtttttgagatgtttatattattgttcggtttgttttttatttggaagtttgggaatgaggagattgagataaatttttgaaattttaaatatgtttgtttatggttttttggttttttttgtttttagtggtgatttttgtgtttttgagttgttttttgagagtttggtttgggaaaagaggaggaggggttttcgttggaggaagaggaattttttagttatgggtagggtatgggtatagtggtttcggttttatttattttttggattaattgatagtgttttggtttttgtaggtttttttttttttattttttattaaatggaagttttttcgttttttggttgtatttttagaggtgttgagagaagtaggattttttttagatttgatgggttgtaggttgtgttgtagatggtgtgtttttattttttgtgttttgatatttgagtgtttagtttttgagttatatatttatagtatagttagttattttatttacgttaaatattattttatttttatggaatttaagggtttggtttttttacgtttagagtatattttgtttagtagttttgagtagtttgttttgggttgggttttttgtggtgttagatgtataatgttatttaattttattgaaaattttatgaggcgggtgttagttttattttggagatttttatttttattttatttttgggatagggtttcgttttgttgtttaggttggagtgtagtggtataattatggtttattgtagttttaatttttagggttttagtgatttttttgttttagatttttgagtagttgggattataggtgtgtattattgtgttttgttatttttttttttttttttttttttggaaacggagttttgttttgttatttaggttggagtgtattggtgagattttggtttattgtaatttttatttttttggtataagtgatttttttgttttagttttttgagtagttgggattatagttgtttgttattacgtttagttaaattttttttgtatttttagtagagataaggttttattatgttggttaggttggttttgaatttttgattttaagtgatttgtttgtttcggttttttaaaatgtttggattataggtatgagttattatgtttagttttgttttgttaatttttaaaattgttttgtagagatagggttttgttatgttggttagggtggttttgaatttttgggtttaaataatttatttgttttggttttttaaggtgttgggattataagtataaattattgcgtttagtttttattttggagatgaagacgtgtgtttagagaaaagtttttattgggatttaatttaataaattaggtgtaggttttttttggttgttgtaattaaattttaaatataatggtggtttagatgaggtggatgttttttttgttgggtataagtagtgtagagatttgtaataatgggagtttatattttttttaattttatttttttgttattttgatgtattgttaaattttatgtttaaggtttgtattagtttttattatcgtgtttgtatttttatttagagggaggagggaaagaaggggatgggtagttttttttttttttttattttgttttagtaaggtgttttttttttttttttttttttttttttgagtatttgttatggatgggttgggttttattttggatatttagatttattagtgagtgaaataaaattttgtgtttttgtagtattttttttttagtaggatagttagaaataatatataaatgagtgaacgatatattatgtttgaatgttatgaatgtaggggagggaaaaaggatagaataaggtaaggggattttaatgtgtttgtgtggcggggggtaggttgtatttttaaatagtgggttagggtagaatttattgtaaaggtgaggtttaagtaaaggtttgtaggaggtataggaagagcgttttagataaagggaagggttagaggaaaatagatagaggtatggttagatagttcgaggagtagtttggagattagtgtggtggggtagagtgagaaggggaggatggtgggaggtggagaaatagaggtgagggtggggaattggtggggggtagggaagatttaaggcggataatttggggtttgtgtttaaaatggtagttagttggttatttaaagtattaaataaaataaaaacgtttagttttttagtcgtatttgttatattttaagtgttttggtagttgtatgtggttagtggttattatgttcgttagtacggttataaaatatttttattattatagaaagttttattggaaagtattgatttaagattttataggttgttttaagaattttgtttttttttttttgaaatggaagtttttttttttttaaggatattattagaaagttgtttattttttttttatttgtattttattggatagaacgtgattatatggttatagttagttgtaagggaggttgggaaatgtaatgatttatatgttgagttgaaatttatatgattatttaaaaggaggaggatggttgttaggggggttagttagtagtttttgttatttttaggtttggtgaattttaaagtattttttattgtattgttttgttttgagttttgggagataattttttgagaaaaataatttggaaattatattttggtgattttaggttttgaagtttaggaattaggttgaggtgtatttagttgtttgttttattaattttttggatatttagatatttagttttttaatttgtttggggatttttatagttgttttatgggcgttatttgtttattattgtaggttaggggtaagttataaaatattagttttttttggagttttttgttatttttttttgggggttaattgttttaggatagttgtgaaggaaggtagattaattttttaagtgttttttttttattttgttattttttatgttttttttatttttagtgatgttttatattgaatttttgttgttttttgtttttaaaggagttagtttttaattttatatggagataatggagggttgtgtaggtgtggggggtagagtgggtattatagaggatagagagtaattttattagtattttttattgtttaagtttgagttgtaagtttgtgttttgagagttggtgagaagttaatttttttttttttttttttttttttgagatagagttttgttttgtagtttaggttggagtgtatggttttggtttattatagtttttgttttttaggtttaagtaattttgttttagtttttcgaagtagttgggattataggtatatgttattatgtttagttaatttttgtgtttttagtagagatggcgttttattatgttggttaggttggttttgaatttttgattttaggtgatttatttgatttggttttttaaagtgttgggattataggcgtgagtgagttattgcgtttggttaagataattttgagaaggtggttaggagtgtttgttttagaaattagtataaggaggattttgaattttaggggattaggagttatatgttgggattaggtttttattttaatagtaatttttattattttgtcgacgatttataagataggttgtgatatgtttttaagtagtttttttgtgtgatttttataataatttgatggtgtaggaataatgagaaaaatttagaattgtgtaaaaataaaataaaataataataataaaaatttttttttaaattgggagggagttgagaggttaaaaagtgatttagataagtttagtttggtgagtagatgagttttttaggatttatatataaggtatttttggatggtagtaggatagttttagagattcgtgttgttttttatgttaaagttgtttttaagttaattttttgattttgtcgattgtgtgtgtgcgaatggattgttttttttggtgggtttttagatatttttcgggatgtttgggtttttagggatatttgtttttcggttaggtatcgtgattttggttcgttatttggtttttaggatttaggtagtggtatatatcgttaagtaatttggtaggggatttgttatattatagtaggtattattattgtttttattttgcgagtgaagaaatggaggttttaagaggataagaaatatgtttaggaatttatatgtgggttggtgttattttatatttatatggttaattaggataggtttagtttgtatttggttttttttttttagtatttgcgtttggttgggtatttttttataagttgaattcgttattttttatttgagtgtttatttattttttattttaattatttgtgtggatttatgggttaggggaattatgttttgggggtgttttgtttatgtttttttttttggtttttgagtttttggttttaatgtttaagtaaagggaaatgaaataaaaattttgtttaaattaagatttttgtttagtgtttgatttttttattgttattagattttaggtgagtgatttgttttttttgagttttaatttttttatttgtaaaataggataatgatatttagtatgttatatttaagattgttgtaagtatcgaaatagggatgtaggagaaaagtaggattttaataaatgttgtttttttttatttttaggtgttttaaagattttaatttggtgtgtgtttttatgtatgcgtatatgtgtgtggtgtgtgtgtttttaaataattttttagatgttttgtaggtttgtgatattggtgttgagggagatattgtttatttttggaattttttgtttaatagggggatagttagagatttgagtatttaatttttattttttgttagttttgtgtttagggatttatagagttaagtaagttattgaatttagtatatcgaattttatttattgtcgtttaggagggtgggggtttgttgaaagatagggtcggggtttgttttttgtattttcggtttaaaagttcgggttaagaaggatataggttttaatggttgttatgtgttgtagataatatggtgttgagattttgtatggtggagggtgacgttggtttttgaagggagatggaggaggaggtagagttgggaataaagggttaaagggcgttatgtaagagagttttttatttttattacggagatatttagattttagtagaggtttaaattgatttataaatatatagttttatttttttttttttaaagaattatttttttaagtaattttaggaagttggatttataggaggaatttgttagaaaagatttttttagttttagttgtaaagttatattcggttttgcggatttagaagtatagtttaggatttagtagttagggttgattttttcggagatatagaatttttttgtttacgtttttcggtatagttttttttttttagtaatgtttttttagagttttttggaagtttaggattggggtgtttttgttatttttagggattatgaagttttattttttttttttggtttttttttgttatagggatttaggagttttgttttttagtttttatttgttttatgtgagttgttaaggagggttaagaggaggataaggggtagtttagattttatagtggttattgcgtttttgggatggaggagatattgaagtttcggtggtttttttttaataggtttgtttttatattttatttaagttttagtataagtgtttgaggggaaatgggaggaggaatttggttaattggattttttagtttttttagtaagagaggatttaggagaggattatttattgtgtttttggggaaaatagaaggaagtttttttttttttattttgtgttttattttttttttgtgtttttaggtttgagggagtgagtgcgggttttatagatagggaaatggagagggaagcggggattagggaggcgttttttttgtaggtgtttgggtttttatttatgttcgggttttttaaggatttttagagattaattattaattgtagttaatttttattatttttgatatcgaagggtttaggaatgtgggtttaaaagggaggggtggattaagttaagttttttttagaatttaggtgttttgtttttttaggttttttttttttaaatattagttaagtgtagtagtgaaaagagtagaaggagtagaataaggagttgggtttataatggattgtgaatattgtttttttagttttggtggttttttagatgagaaatttggttatgggaatttttattgttgaatattttgttttatttgttttaacgtattttggattgttagggggagatacgagtttttttagatatttttttatttttgttttgtgtatttatgaaaaggggatatttatttattttcggtcgagatgtttataggtaagcgttgggataggtaagtataggatagatgtgtagagggagttattgattttttttagaaattaggaaagtaaggtatagagagggtaagtgatttgttaaggttatttagttaataagtagtagagagattagaatttatttttttagttagataaagagatatattagttatggaaatttgtttgaatatataagggtataggttagtatttttttatttgttatttttttatgtagtttttttattttttttaaagttagcgggattgagtatagagagatagaggtagagagagtattgggtagaggtggggagagtaaaagtaagatggggaaatagagatagaggtttggtttgtattgtaagtgtaaagtgaggtaattaatgatttttagatttgtataggataataggaagattatagtgggaagaaagtatggaggagaagagtagtaggtataggagggacgagtaggaggtagaattgggaatatagagagatttttttcggagaagagtaagggttttttttttttttttttttttttttttttttttttttttttttttttttttttttttttttttttttttttttttttttttttttttgatagcgttttatttttgtcgtttaggttggggtgtagtggtgtaatttttttttggtttagtttttcgagtagttgggattataggtattcgttattatagtaggttaatttttgtatttttagtagagataaggttttattatgttggttaggttggtttttaattttttattttaggtgatttattttttcggtttttttgagtgatggaattataggcgtgagttatcgtatttggttttttttatattttttatagttatgtgttaggtttattattaagtatttttttatagcgtataagcgtttgtgaagtaggtattagattatttcgattttagaggtgaaattaagatttaggttttgtgatttgttagagaatgtatagtttagtagtggtggattttagtgtagtggatttagttttggtattgagtttttgaggatttagggttgtttggttttagagttggggtttgattttttatattatattgtttttaaatatgatacgtgttttttttggtgttttttattttttttttttttttttttgttaaaggaatggaaagttttgttagttgtagttatttaggtgagatacggtttaggtattgatttttttagtttatttttaggtttttagaaggttagatgtagttttagatttttatggtttttttataattttagtttttaaattttgtttttttgagggatttatacgttttgatttttaacggttgtatttttaggaataagaggatgattttgggataggttatttgggtttttttttttaaaggagggtttgggttgtgaattgatttagatttgggggataggtttttagtttaggaagagtttaagggttaggtgggggagttcgtaggtttttatttatttttttttttattttgtgttttttgggattaggttgggataggttaattttttgggataatttggcgatttttttttggggatggagattttggtgttggtggaggtttcggtataattggttttttcgggatttataataggttttagagtttttaaagagtttgggagatgggtttggttaatatattttaattggtgttatggatattgtgttggtgttgtttttgggtttgtaggttttggtcggatttagtgagtatttgggtttagatagggggttttgaggaaggatatgaatttgggatttagtgggatggttaatttttttaattttgttttatggtttattttttttttttaatagtttagttgattttattggggatttttgatatagtatttttaggttttttttgtttttggaagtttttttattgtttttggaagttttttttttgtttttggagtttttttcggtttttggaagttttttattgtttttggaagtttttttattatttttggaggtttttttattgtttttgtaattgtttttattatttttaaaagtttttttattgtttttgaaattttttttttgtttttggaggtttttttattatttttgtaattgtttttattatttttagaagtttttttattgtttttgggagtgttttaatagtttttttaaattttgggagtttttttagtagtttttagtttttagttttagtcgtttttgggagtattttaggaatagtttttatattattaggtgatatttttgttgtttaatttatttcgggagaattttttagttcggtttgtagttttggggtggggttttttgtaagtttggtagttttttagaattttagtggaagtagtttttttgtttttgtggttatataagggtttttttttttgttttttaatttattatttttttttgttatgattagtttttgttgtattttaagatttttttggttattttaaggttatgaaaatatttttttttgtatttttttagaaacgttattattttagtttttaaatttaagtttattatttattttaagttaatttttgtgtatggagcgaggtggaagttaagatttattttttttttttatgaatatttagaattattatttttaaggatttttttttgtttttgttattgaacggtgagtatttattttgaaagttaagtgattatttgtgtgggtttttcggtaagttttttttttttttgaggtggagttttatttttgttgtttaggttggagtgtaatggcgcgatttcggtttattgtaattttcgtttttcgggtttaagtaatttttttgttttagttttcggagtagttgggattataggcgtttgttattatatttagttaatttttttgtatttttagtagagacgggattttattatgttggttaggttggtgtcgaatttttgacgttaggtgatttgtttgttttagttttttaaagtgttgggattataggtgtgagttattgtattcggtttattagttagtttttattttagggttatagtgtttaaggattatagatttgtagtaagttttgagattttatagtgtaagttttttttttttttttttaagagagtgttttggttatttttagttttgatttttataatattattttattagtttattttaaaaatttgttggagttttgtttgtgggtgtatttgatgtgatttttgttttgtttttgtttgaattttttttgttttttttttttgtttttttaggatttgttttatttagtgttttcggaatagttttaattgtgtttgggattttagtattgagtgttgttgttttaggagttttattgttattatggttgggtggttattacgttttttgggtttagtattttggttagttaagttatttttttaggtattgggttatttatagtaaaatgttggtgggtttatttttttttatttttttgtagttatttttggttttttgggaggagtttagggagagttattagtttttgtttttaattgtattttaaatttgtttgaggatgtgtttgtagtttaaaggggttttggtggtttttggttagattaattgttagatgtttgttatttggttgttttttcgaaaggtttttattttttttttttatgatttaatttttttgtttagggcgagaggtattttttttagagattattttttttttttttattatttttttttttttttttttatttttagaaggggagtatagggaatattacgcgggaagtttgacggtaggaaacgaatggaaggaagataggagattaggttttggttttttttaaggataagaattagggtggagtggtggggagaattggggtttggaggaaggagagtgtttattgaggatttttttagtgtagaagtattatagatttagggatgtagaaaatagggttcgagaaagatagtgaggtgcggattttagtgatgagtttgggattgatagacgtgtttatagggaagaggtaattgagatttggattgaagttttttaaatttttatttttatttttgttgagattttgtttttaaggtgataggagaaaatattagagagatgaggttttagagttagagatattagttatagaaagaaagatggaaagttagagggtagtgggggtttggggggttggaggtattatttattttagttattggttttgtttttgtgttttaggttcgaagttttagaaggattttgttttagattgggttattgtgttgattatttttattttggtggtagtaattgttagtttaatgtacggtattaagaaggtgagtaatgttatggtttaatgtgtgggatttttgtgttagtggggttgggatttggtgttttaggatttagaggagaatagggttttggggaggggaatgatagtttgtagggtttgttgtagggagggtaaagagagtttttgttttagtggtcgagaaaaatatcggtttggtagggatagggggttggggttattgaaagaggcgggggagtgttggaggttgattggtacgtggaagtatttaatttagttttaggtaatgaaggattagttttgtggagttatatttatttgggtttgaatttttgtgtaagttatttaatttgtttgtgtttcggattttttattaataataatatttaaataataataatattatatcgtattgattatgtgttaggtgtgttaggtgttgtatatattttagtttatagtaagttagtgatataggaaatattattttttattttatagatgaggtaattgagttttggatgaaatgagaatgatggtatttattttaaagggtggttgggaggattaaataagtttatgtaaagagagtattaatggtgtttggtatgtattatagtaagtgtttaatatatagttttatttattattattgttgtttttgtttaaagaggaatgttgagtgtttgggttgttaagaggaagtagtagtttatgggaagagttgggttgagtagtaggttttcgggtttttagattaatttatcgtattttttttttattttataggtttgttagtttcggagggagatgagtttggggtgtggttgtggttttgtgattttttatagtagttattatgagggggaggttgttagttagcgttatttttgttaaatgaaaggtggggttggggtagttgagcgtttattttttggtttttttttttttttttttagatagttttatttttagatttttttattttatttattttagttgggattattttttgtaggtagatttttggggttattggtttttttaggttttttttatttatagcgtaaggaggagtttattgttagttataagattttgttttttgttttgtcgttagttatgtagattgcgggaaggtgtttagttttttcgagggtagtttttttatttgtagaaggaaggattagggttaagtggtttgtaggtattttttagtttttacggagtttaggtttggatagttggaatttttgttttttattttttttttttagttttatttttttttttgacgattagagaagttttttagttgaggatagtttgtttacggtttttttttttatttttttttatagggagtttttttaggttggtttttgagtttttaaggttttttgattttttttttttagggtaggtgtaggatttttttttgtggtgttttttcggtttgttatgggagggtggtgaataagttattgttaaataaaatggtattttttttatttgttttttagatgttgtgggtttgtttaagtgtatgggtttttgtgttatgtgggttcggaagggttaagtttggtttttgttagttattagggtaagttattttttgattcgaggtttatttatttttatttgtaaagtgagggtgataggtgataatttataggtgaggtgtttagtatattttttagtatatagaaatgtttaaataatggtagttggtagagttgtttcgtgattggttttttagtttttagtttagatgaagtaatatagattgattgtaagagattgttttgggtttttatttatttttaggtttttttattttagatattagcgtttttggggtggagttgtagtttagagagaagggaagggggtgtttatttataaatattggttagtgtttattttaaagtagagattttttattttagtataattggtgttttgggttggataattttttgttgtggagattgttttgggtattataggatgttttatagtatttttggtttttattttttagatgttagtagtattttattttaaattgtgataaaaatgtttttagaaatttttaaatgttttttgatgtgggtaaaattatttttttttgtatagaattatcgttttagaggtttgggtttttggggaaagggggggggggaaggggattagtgaaaagggggattgttagttattcgagtttatatggagttgtagaggatagtttgtgtttgttttagtttttttattttgtaggatatattgtttgggaggtaggttgtttagttttgagtagttagtttttggtttgattttacggagttttattaattttttattaattatattaataagtagttggtttttttttttttttttatttattttagttttgtttagggtttagggataagttatattaagtaaggagaggaatttatatgtttagttttttagtttttttatgagtttaaatgttttgagggtttggttttttgtttttaggttttggatttttttatggtttttgtttgtttttattttttttagaaaggtatttttcggttttggtttttattttatttaggcggagtggaaatatttattgattgtttattgtgtgttagatattgttttaggttttgatgatatagtagggatttaaggtgtttattttttatggagatttatagtgggtagaaaggggttgtgatttttttgtgttagagatttagggagtttgtttttttttattttagttttaggtattgttattggggagataagggagtttttgagttaatgtttgttttaggtaggaagtgaggaagggaagggggagttttggggtgtttttaaaaatgagatgtttgtatttttgtataggagtgaatggggatttcgagataaagagatagtcgttgagttgaggtgggagggaagaggtagagtgaaagtagaagtttttgtatatcgagtattttttggttaaagattttggtttcggtttttttgggtggtttgatttgtttgtgtttttggtgaggggtgtgatatatgtttttgtggttttgtgttttgtttttgttattgtttttgtattttttatatattgttgtatgatttttgaatattatgaagtatttttttttgtagcgagggttattcgagggttttttttcgtttttgtttttttatttgattttcgcggatagtttcgtttaaggtggtaagaatgattatgtgtgaataaggggtgtggaagttgggttgatgcgggagaggtgggagggtgcgcgtgaagttggatatagattagaacgtgaattttattttattttgtttttagttagagtttagtttttttagaattgagttatttgttttttatttttttagagttttggaggcgttatttttatttttttttattggggttggtttaggtgtttgtttttttttggtttttttgttttgtttttagattttatttttcggtaggtatttaggtgtttggttttatgacgtagtagttgcggtttttttttattagggtttttttgtgggttggggtggttttatttgtttaagatttagttttgaggagttttagtttttatgacgttaagattggttttatataaggtgaggggttcgtagtttatggtttttaagtagttatttagtttcgatatggtttagtcggtttatagtttttgtttcgtttttggtttttagtgttgtttttttttttttttagttttttggggggtaggtaagatgtttataggggatatagaagatagaaatagtttgttttttagtgtttatagcgttggataataaatagaaatgaatgaagggggcgggtacggggttgttatagatagttgtttagagtgttttttgtttaagtttgttggttaagggatatgtagtaggagatgaaatttagtttgtgttttgttttttaaaatatggtttatagggttgtatttatttagagggggtttttttaagtttgtataaagatattgtagaggttgttagttttggatggtgggggtaggtatttgatatttattgagtatcgtgtacggaatttatagttgtttatggtgatttttttttttttttttttttttttttttttttttttttttttttttttgagaaggagttttgttttgttgtttaggttggagtgtagtggtataattttggtttattgtagtttttgtttttcgggtttaagcgatttttttgttttagttttttgggtaattgggattataggtatttgttattacgtttggtttatttttttgtatttttagtagagataggattttattatgttggttaggttggttttaaatgtttggttttaagtgattcgtttgtttcggttttttaaagtgttggtattataagtgagagttatcgtgtttagagatttattttattttattttagtattttttgaggtggttaataatattttattttatagttgaggagagtggatttataatgattatgttttatattttatagttagagggaggtaagtagggattttagttttattgtttttagttttggggggataggtggagttttttttttgagagttttgttttgtgtagatttagtttttagttttgattttgatttatttgtttattttggttttttatattatttgtaaaatgggttggatgttgttgtttagtcgtattagtatttgatgtttatagagtatttatattgtattaggtgttgttttagggattttatttatatttatttatttaatttatatggagatttagaaaagtgtgcgttaaaggttttgtttttgttttatagttgggaaatattttaggattttgatgggaaaatgattatggataagttcgacgaataaaatatattttaaagataagatgaaattatgaaattagtttatttagttaagaaacggattgttattgaattcggggagtagagatgttgaatataggggcggtgtggagggtttgggtaatttggaggagggtttttataaggtagatgtagaatagtagatttagagatattatttatttattggatagttatttaaggatagagttatttatagggtgatattagaggtagtgttttttttttgagtatagttaggttgaggttaggggtggaggtaggggtaggtgggtggtgaatggcgatgattgaggaatttttgagttgtttttgaaaggttttagtagtgcgttttgtttgtgttttgatttgatgtttgttttttttattttgagggtttggagatagaggtattatagttgtttaatatttttcggttttatttttttcgtttttttttttttttttttttaggcggattgtttattggttgtttttttttttttttattttgtagtttaaggaagaggaatttgtagggggcggaagggaatttattttatatatagtcgttttgagatttgttttagggcggagatttgaatttttgagatttcgatggggttatgtgggcgtggtttcggagaggagataggcgtggttgggcggtatggagggaggggtggggaggataaggggagttggttgtttttattttgtagattttgaagataagagtgagtgggttataggtggggagggtttgaggttgggttcgggttgtgatgaggtcgggtggaattggagtgtgaattagagttggtgtatggttgtgtttagtagagagagaggttagggtaggaagggaagagggataattgggatggatgaagttttttagtttattattttggtgaggagattttgacgtttgtttataggattagttaatatttagatagataattagattttggaattttagagtttgtattatgtagttatagaattataggtataatttagattaaattattcgagggtagtataggtgtagtttagattaaattattatagagaggtataggtgtagtttagattaagttattagagggaggtataggtgtagtttagattaaagtatttgagggagtataggtgtagtttagattaaattatttgagggagtataggtgtagtttagattaaattattatagggaggtataggtgtagtttagattaaattattatagggaggtttaagcgtagtttagattaaattatttgagggaggtttaagtgtagtttagatgaaattatttgagggagtataggtgtagtttagatgaaattatttgagggagtataggtgtagtttagatgaaattatttgagagagtataggtgaggtaggagatgggaattggggttggggtttttggaagaatttaataagaatatttttttataataaatgttatttgatttaatttttataatataaataatgtatgtttattgtagaaaatggaaaatagaaaaaataagaaagaaaaataaaatttttgtatattttttagtttttaagtaattatttgattatatttttttttagttttttttttttttttttgtagagataggtttcgttatgttgtttagattggttttaaattggtgatttttttgttttagattttttaaatgttaggattataggtgtgaataattgtgtttattagtttttttttttttatgtttgtattttaagttatttattgaatttatattgtataggtattttaataaatatttatttatattattgtaaatggagtatgttatttatgggggtaaggatattaggaaatattagagatgtttttttgggatagcgtgttttgatagcgattttaaggtatgagttgtttagtaagatattttttttttttttttttttttttttttttttttttttttttttttttttttttttttttttttttttttttttttttttttttttttttttttttttttttgttttttttttttttttttttcgatagagttttattttgtggtttaggttggagtgtagtggtatgattttggtttattgtagtttttgttttttaggtttaattgatttttttgttttagttttttgagtagttgggattatagggttttgttaatacgtttggttaatttttatatttttagtagagacggggtttcgttatgttggttaggttggtttcgaatttttgattttaggtttataatggttttttaaagtgttgggattgtaggtataaggtattgtgtttagtcgatgtttttttttttaaatgagtgaataaagtagatggcggggatttttggtattgtgtatcgttttgatgttgtgggatttgtttttatttttttattttagttgagtatttatttatagtgttttgtgttaaagttggatttttttttttgtattttttgtttattttttagtgattaaaatagtttttttcgggttatgatggttgtacgtggaatgaatattttttggtgaaaatttattagggaaataagttattattaaagtagatcgtttggggtagagatgttttttttgttttgggggtttatattgatttgttttttggttgtgttagggttaaggaattttttgagttttattttagttttttataatttatggttttataattgtttgatgtagatttaaaattttaaaattttgttatttgagtttagttatggattgtgattttgtggtttaatgataattggtattttagaattggtgggttagaggtttttttttaacgttttttaattttagagtttaattattgaatagcggaagtcgtttttggttttttagtttgtggaggttataaatatatttggtttttatttaacgtgtatgatgaaatgttgttggtaaggtttttaaggagtttttattagttttatttttttatttattatttaataaatatttataaagtgttttttatggattagatattgttttaggttggagatagcgatgaataaaataataaaaatttttgttaggttaggttaggttaggttaggttaggtgtagtggtttacgtttataattttaatattttaggaggttgagatgagaggattattgaagattagagtttgagattagtttggttaatatagtgagattttgcgttttaaaaaaaaaaaaaaaaaaaaggtgaggagggggtatattggtttatatttgtagttttagttgatagggaggttgaggtgggggtattgtttgagtttaggaggttaggattgtagtgagttgtgattatgttattgtattttagtttggtgtagagtaagattttattttaaataataataataataataaaaatttcggtcggatgtaatggtttatgtttgtaattttagtattttgggaggttgaggtgggtagattatgaggttaggagatcgagattattttggttaatatagtgaaattttatttttattaaaaatataaaaaattagttgggtgtggtggtatgtgtttgtagttttagttatttaggaggttgaagtaggaaaattatttgaatttaggaggtggaggttgtagtgagtttagatcgtattattgtattttagttttggcgatagagtgagattttattttaaaaaataaataaataaaaaaagttttgttattgtggaaatttaattgtatttattatatattagaaagtgatgagtgttgtgttattaaaatatagtagagaaagtggtttaggaatgtagaggttgttgtttttaagaaggtggttatagtaggtgagaggtggatggagtaggtaggggggtagggttattgtttaggttttttttattattaggagaaggatagggtaaagtacgagattattttagagattataatgtggatttaataaatatttaaatagtttttgtgttttagagttttttatggtttatattttttttaatttttatattaagttggtgtagttagtattatggttatttatagtcgagaatatggagttttagagtatttaagagatttgagtaagaatgtaaaatcgttgagggatcgagtttggatgttaaatttgttttttgattttttaaggttagtggaaaatgttttttgtattgttgttagtttttttatttatttaatagatagttatttattttttattatgtttaaaaatatttggggtatagtgaaaagtttaattttgttaattatttaatttttttgcgttttttttttttatttgtaaaatagtaagattatattttttattttataggtttataattatttgattaaataaataaatatatgaatagtattttttagggagtttatatatgttagtgtttttttttttttaaaagattgggttgatttattggttgtgtattgtggttttaattagtaatgatttgggttcgggattttaggatgtgtgtttagattttgtttcgattttttatttgttgggtgtttttgagaagattatttaattatttagaattttgtttttttatttataaagtttggagaataggatagtttttaattttaataggtttttgtgaaaagtaaataagttaatgtatgtttttatttgtagaatttgtttgttttattgtagagttttagaaacgttgtttattgttattgttgtgggattatgtataggttatttttttttcgtgaaatgtaaattttttagatgtaaaataggggaagttgatcgtttttaaagagttttatggagtattgggagattaattattatagaagagaatttagaaagagaatgtttgtgaggttattagttatattttggggtcggggaaggtgtttaataaataatagttattattggtattgttgttaaggagattaggtaatgggattgggatagtggagtgtaggtttgattatttagtttttttttttttttttatttttaattttttttagagatttgggtttttttattatttttatattttttttgttttgtttatattttttttaaggattaagttttttaggtcgattttgtttattagtaggtaggtggattgtggttttttgtgattgggaataggtttaggtttcggttgtcgttttgagttaatagggattagaaattttagttatgtaatgatattattttttttattttttggtgattttttggtttttatttttttggttaggtattagagatattttttttgtttttattaggttgtttttttatggaattaaggcgtgtatttgtttattgataggggtgtttttttttatattttgtttttaaatatagttagtttttattataatttagttgtttcgtttatttttgttaggatttttaagtagatattttttttttttaggatggttttttttatttatttttagttggttttaaatgtgtgaagagggggatttagtggggtgattataagggttgggttattttatttattttttttatttaattttattatcgaaatgaaagttttttatttttttattttatttattttttattttttttatatattttttatttataatttgtgtttatttgttaatttttatgggaagttttgttagaggttttattttaattttttatattgttatatttgggatggtgttagaatgttatggaaaggtgaagagtttaacgtttatttttggtttttttagttatgttatagaaagaagattttattttataagttatagattttaaaggggtatttgtatagtaaaatgttagtttatatatgtttttaaaattttattattggataggtatggtagggagtggaggtcggtaggtacgtaaataattgtaacgtgaagttgaaggtaataggatagaatggtgaataaagatttttttaagtattgaaatgaagttggattttatttgtttagacggattagaaaagatgttttaaagttagaaggttttgagatggagagttgaggagatgtggaaggggatgaggtggtatgtttgttgaaggtatagtttgagtttaggggttggaggtgagaatggggaatagatattatagtatttagaggagattggttggggagttatattagggggaataaagagattttttagagaaggaggtgggaagggggagttggagaagaatatgggggaagttttttatttgtttttttttttttataggtgttattatattttaagaatattagaaaattggggaatttttaatattcgattatatatttttttttattttaggttttgtttatagtattttttttgattatattgttttgtatttaggataaagatttttagagttttttaaatttatagaaatttatgagtaaaaacgttattgtaatattatacgttattttaagttaattgataagtttataggtaattttaaaattatagattataaaagttttatagataattatgaggttttttttatttttgaagaaaattttagtaattaagggaaagatttaatgattcggaattagcgttttgttgattttgttgattttattattatatataaagaattcgttggaaaaaaatatataacgttagtatttaagagtaaaataaattgtcgtaagtttataataggtaaattaacggtaataagaaaattagataaaattggaagatttttggaaaagtttatgagtattttggataagataagtattagtttatataagattataatttttttttataatttaggtaatttatagattaagtaaaaaagtatattttttttagaaaaaattatagtagttttaaaaataatatataagattataggaattttagaagagttagaaaaaattgaagattttagaataatagttgttttagataagtttttgataaaaattataaaaaatatataagagattatattagttaatgagtttatataatttttagtagagtttatagaatatggaggaaggatagttaatgagaataatatattatttttagtagagtttatagaaaatagagaaaggatagttaatgagaatattatattatttttagtagagtttatagaaaatagagaaaggatagttaatgagaatatcgtattatttttagtagggtttatagaaaatagagaaatgatagttaatgagaatattatattatttttagtagagtttatagaatatggagaaaggatagttaatgagaatattatattatttttagtagagtttatagaatatggagaaaggatagttaatgagaatattatattatttttagtagagtttatagaatatggagaaaggattttatttgttaatgataaaattatattatttttagtagagtttatagaatatggagaaaggattttattggttaacgagaatattatattatttttagtagagtttatagaaaatagagaaaggatagttaatgagaatattatattatttttagtagggtttatagaaaatagagaaacgatagttaacgagaagattatattatttttagtagagtttatagaaaatagagaaataatagttaatgagaagattatattatttttagtagagtttatagaaaatggataaaggattttatttgttaatgagaaaattatattatttttagtagagtttatagaatacggagaaaggattttattggttaatgagaatattatattatttttagtagagtttatagaaaatagagaaaggatagttaatgagaagattatattatttttagtagagtttatagaaaatggagataggatttttttggttaatgagaagattacgttatttttagtagagtttatagaaaatggataaaggattttatttgttaatgagaagattatattatttttagtagagtttatagaatacgaagaaaggattttattggttaatgagaatattatattattttcggtagagtttatagaaaatagagaaaggatagttaatgagaatattatattatttttagtagggtttatagaaaatagagaaatgatagttaacgagaagattatattatttttagtagagtttatagaaaatagagaaaggatagttaatgagaagattatattatttttagtagagtttatagaaaatggataaaggattttatttgttaatgagaaaattatattatttttagtagagtttatagaatacggagaaaggattttattggttaatgagaatattatattatttttagtagagtttatagaaaatagagaaaggatagttaatgagaagattatattatttttagtagagtttatagaaaatagagaaaggatagttaatgagaatattatattatttttagtatagtttatagaaaatggagataggattttattggttaatgagaagattatattatttttagtagagtttatagaaaatggaaaaaggattttatttgttaatgagaagattatattatttttagtagagtttatagaatacgtagaaaggattttattggttaatgagaatattatattatttttagtagagtttatagaaaatagagaaaggatagttaatgagaagattatataatttttagtagagtttatagaaaatagagaaagtatagttaatgagaagattatattatttttagtagagtttatagaaaatagagaatggatagttaatgagaatattatattatttttagtagagtttatagaatatgaagaaatgattttattggttaatgagaagattatattatttttagtagagtttatagaaaatggagaaaggattttatttattaatgagaagattatattatttttagtagagtttatagaatatggagaaaggattttattggttaatgagattattatattatttcgagtagagtttatagaatatggagaaaggatagttaatgagaaggttatattatttttagtaaagtttatagaatatggagaaacgatagttaatgaggatattatattatttttagtagagtttatagaaaatggagaaaggattttattggttaatgagaatattataatatttttaatagagtttatagaatatggagaaaggatagttaatgagaagattatattatttttagtagagtttatagaatatggagaaaggatattattagttaatgagaagattatattatttttagtaaagtttatagaatacgaagaaatgattttatcggttaatgagaatattatattatttttagtaaagtttatagaatatggagaaaagattatattggttaatgagaagattatattatttttagaagggtttatagaatatggagtaaaaattacgtcggttaatgagaagattatattatttttagtaaagtttatagaatatggagaaaggattatattatttaatgataagattattttatttgtagtagagtttatagaatatagagatagggttatattagttaatgtgattatattagttttagtagagtttataaaatatgtaaaaaggattatattggtttatgagaagatgatataagttatagaaaagtttatagaatatttagaaaagattacgttaattatagagaaaattataagaattttagaaaagtttacgttatatttagagaagattatatgtattaaagggaaaaatatattagttttagaaaagtttatagaaaatttggggaatattatattgattattgagattataaaagttttagtaaagtttatagaaaatttagaaaaaatagtagtagttataaagattataaaatttttagttaaggttataggagataaattttttattattatttttttttatttaaataaaattgaagttatttattaggtgtttattggtttttttatttttattatatttagaacgaagttgagttttattatattagaagttataggaaacgagagttatttatattttaataaagatggtttatagaaaggtatttacgttggatagatgggagagaatgatttattttttgtatgggttatagttattgtggttttggtggttgtgattttttttttggtgttttttggtttgatttttttggtaagggatagatgtgttttatagaaattaatttatgggatagggaattgaggatatattaggggttagagttatagggaataatgagtttaggaaaagagatatggtagaagtgggaggaatagtaatagagggagagttttggtgaaaattaaggagaaagataataaatatataggaggtaaaaagttggaattggggataaggttgtggttgagaatgaaagggtgtgaaagagaaagtgtggggggtggagagtttggggtatgagaataggaggtgtaaagataaggagaatatggtagagtggggaattggagatggagttgggatttattgtattggatttggagttggaataaatattaaggtttggatggaattttgagaatagaattaagatttgaggtgagtgttgtggaaaataaatcgtagatggtttttatttttttttttttattttaattataggttttttatatgatgcggatacgtcgtatattaatttagaatatttagtataatgatgtagaggatgagggtggttttaatttttattcggtttatttgatggagtagtagaattttggtatgggttagattttttttttacggtgattttggagtaggcgtttagttttggtttttttatgttttgttttttttttggatgaggaatcggatttataatttttattttcgggattataggaagggtagagaatattgacggttattagtattaattttttatttgtttttgaaattggttggggaatgaggtgataagtaaggagggtgtaagtttaggggataaagaagaaagaatgaataatacgagtagatattttttgtagaaggtaatggtttgagaatgaaaaggtgtttgatggatatgttgtgggggtattaatgtagaatattgtattgagttttaaaggaaggataggagttttataggtaatgttttagattgatttgtgagtggggtttatggggaaagggagggattgagggtagagtttttgggttttaggatagtattatgttatttttatttattattatttaagagtttgtgtgtaaataggtttatttttgagtttttaggatttttgtttttatttttatttttttaatgaaaaaaaaaaataaaaaaaacggatttaagaagaaaagagaatttatttttttttttattttttttatgttttggagaaaaaaaagtttagaagaaattataaatattttttatttatatggttgtttttttttttttttaaattttttagtttttttaaatgtttatagtggacgttttgttggtttggtttgttgggttgtgggtggatacgtaaggaggggatttttatttggttagtagttttatttattgatttttattttagattttttttgattggtgttttagtatttatttttttgttttttttattaaaagttagttgtagttttatttcgtaaaagttatttattttttttattgtttttattttttttttttttatttttattttagatttaagtttttttttttgtaggtattttatttgtgtgtgttttttggattttttttttttttttttatggttattttattttattattgattgggtagagggggaaaaggagaatgatgatgatagtttttttttgtttattgattttttttataataaagtataatatgtttataaagggtattatagttattagattatttattgggagaaagttttgattggcgtttttggttttggttgagattttatagaagtggaggagatagaggagttggagggtaggattggtaatttatggagggttaagaaaggggaggttgaatttttattgttttaaaaatggtttttttttgggtttaggtaagagttagttttagtttaggttgggtttatttgtatggtgataaaatgagtagaaaaatttgttaattaataagtaagtattttaaagtaattattatatattttgttgaggatataaagaagtataagatatagtttttatttgagatataaagataggaaaattaaaattaaataatttaataagagttgttataagttaggtgttatatagaataaaataatattttaatttattaagtttaatttcgtgagtatttattatgttttttatttatgttaggatattagttttgttttaaaatcgttgtgtgtttatgttagttttaatagaaattttttattatttatgtagttttggtttttttattagagtatggtattattattaattgaataggtgttttagtttgttgttaggtttttaaacgtaattttatttagaattaaatagtagggttataggttattcgttatttgtttttttgggtatttttatttgttgaaagttggaaatttattatggttagtaattttaattttgatattgatgttattgaattatttggttttggttgggttgggaaggtttttattattgaattttttattagagattcgttttgttaaaggtaagattgaagtttgatttttagaaagtagatatgttagatgttagagggatttagatttaggtttttggagaaaggaggtagagggatatttgggttttggaaggggttggagagttttcgagaaaaggaggaagatgtttggattttagttgtttgggtagacggtgatttagtttgtggtatttgttaggataggagtgtttttttgttttgggagggatgtagaaatttttaaatttagtttggattttaatttaaaaataaaacgaaataaaaatatttttgtttttagagttttaaatatttaatcggatagattttttttttattaagatattaaaatgtagtattggaggttaaagggtgtataagggggatggggaggtttttcgttcggtaaaggcggattgtgggttttggggcgcggcgggtgttttttttttatttttttttttatttttcgttaattattattttgaaatttaggcggaaattttttaataagtttcggggttgggtttttattagggataattatttaattagtaggacgggagggaatgcgtttttttagttttcggggagtatatttcggggggagcgagtgtttcgagggtaggaggttgtcggggcgtcggaagttgttgtttcggcggagtcgtagcgggggtttcggtttttcgagattgcggttttttttcgtttttttaggtttcgttttgcgggcggtttttgattttttgcggatagtttagattagtggttcgaggtcgtcgttttcgtagcgttttagttttattgcgtcgaattttttttttttagtttttagtttttagggaggggtttggattgacgggtttgggcgtagtttttattttcgtgatattggttataaaattgatattcgtttgtgttgtgtttttacgtatatcgtatttgtgatttttcgattattttgcgagttacgaggtttgttttataagttttataagaagttatagattttataagagtttttataaagtttgttttatagatgagaaaatcgaggtttagagaagagttttgtttaaatttatacggtttttatggaatagaaggtttgttttattttttttaagttttaattttattttgttttttagtggagttaggttttttgatattaaggtagttttatttggacgggtgggatgttatagggattatttaaggaatagggtgtaattgagatttgtacgagggtgtttagtttttttttttagagtttaggtttttttttttagttttttgaacgtttagagtttttttttggttttattgttagtattttaggttagggttttttttgttagtttttgttttcggagatatattaattggttttatagttataggttttgtattttttttttatagtgtttagttgtttttggagaggtgttggtaaagtaagaagatttaatgatttgggatatagttatttttattttttttttttttgttttttataaaggtttttgttttagaaatgagatattttagagaaaataggtttttgttgatttttggttgggagggtgggttttttttttttttatagatgtgatttttttgttttttttcgttttttttttttttttttatattgttatggttttaagatatttttttttggagagggagcgtttagaagttacggttttttttgtttggtggtaattataaatgttatagttatggttaagtgagaaaagaaattaagttagatatattgtgggagtaatttttagaatttaggaatttagtatttttagtttttatttattattgttttggaatttattttaattgattttattttttttagaattttgtttttggtaagtttttaattttttttgtaattttatgttttattgagatattaggtattaaggttttttttggagtttatttgttttttagaatttaggtattttagataataattttttatatggattattttaagatgaggtgagggaaattattttttattttttgtatttaggtgatgtttttttttggaattttgagattggtaagtgaattatttattaatcggagaagatattgaggttataaaaagtttgaaggagataagggtttttgttttaggtattttgtttgttttttttatttttatttttttgtaaaagtaaaaagtaagtaaagatgatgaattttttttttgtttttttttgtaaaagttagtattaattttaatttttattaattacgattttgatttttaattttattttgtagtaaatttatttttattttttttttttaatgtttcgttgtaagtatgaatataaataatagttgtgttgtatttttttagaatttcgggtttaacggttgtttaataaatgttttgtatttaatttgaaaattttagttttaatattatttttaaatatttattagagttaggttttaagtttaaagttaagtgaaatgaaaatattatttttagaaatattgtttaaattaaaatttttagtagggtttttataattttcggatagagatagggagggatttttcggattttagggatacgggaattgtgggtgatattagtttgaagagaagtataatttaaatttttgtttttttagttattttatttgatttttttttatttgatttttttttttggtttttttaatgttttaagtttttttgtttaatgattataatttaatgttaggtagatttataaagttttttcgtttttattgtaggatggaatgttataaaaagggagtaaggagatagttgtggaattggaataaatagaaatagttttaggttgaatgaataggaggttgttttgtggtggtttttttgatgtttgttttttgtattttttttttgtttttttattttaggtatttttttggagattttgttttgtatattttgtttttttttttttttttgcgtttttgtgagtttgtttattttaagaggtttaaattattattgtaataggtaatttttaaatttatattaagtttattttggttttgaaatttagttttttatttttaatttttttttaataatatttttatttggatgttatattatattaaacgtgatatttacgtgtttatttggtaaatattttttgagtatttattttgtgttagttttgaagataaattagtgaataaaatagtaataggttttgtttttagggagtttatagtttattaggaaaggtagagattatataaagaaggtatataataaaagagaggtataagtgtgtaaaatattgttaggatttatttcgtttttttattattaagtttaaaaagtcgtttttattagtatttatttttttttgttaatattggagtgttcgtgtattttggttttggtttttttattttatattttttgttttttttatgggttttttttttttttagtttttttttttttttttatagggttttttttaatattagttaaataagttttaagtagtgtgtataggaagtatttagaggagagtatttttaaaaagtagatttttaaagattcggtacggtggtttatgcgtataattttagtattttgggaggttgaggtgggcggattacgttaggagtttgagattagtttggataatatagcgaaatttcgtttttattaaaaatataaaatttagttaggtgtggtggtgtatatttgtaattttagttatttgggaggttgaggtaggggaattatttgaatttgggaggtagaggttgtagtgagttgagattatattagtgtattttagtttgggtgatagaatgagatgttgttttaaaaaaataaaaaataaataaataaaatggagatggttattggatgtagtggtttaggtttgtaattttagtatttttggaagataaggtgggaggattgtttaaagttaggagttagagatttgtttgggcgatattgcgagatattgtttttattaaaaaaaaaaaaaaaaaaattaataagttttttaggtatttttgatgtggtttagggatatattttggaaagttttgttttgttggtagttatttttatagatttttatttatatttttttagttttgtttttattagtttttttttattattaagttttttgaaataattttttataaatattatttttatgtttttattttttattttttgtgtgtatgtattttttttgtaagttttattagagtaatttatgtaaatagtttaaagagtttaatagttttatagatttattgtaaaaattagtacggatgtattttttttttttttatgtttaatttttgttttttagaggagacgatttttaatttttagttttttattttagtatttgtaagtgtagatttaaatattatgtttatattgtattgtaatttatagattttttttaatgagattttaaattgcgttttttattggattaaagaatattgtaagttttaaaatagttttttgttttaattttatttttgaaaggatttattaatttaaatatatttattatgaattgaatagtgttttttttaaatatgtttaagttttttttttattttttttttgagataggggtttgttttgttatttaagttggagtgtagtggtataattatagtttgttgtagttttgattttttgggtttaagcgagttttttattttagtatttattttttttagaggttgttattatgtttagttaattagttttgttttaaattttagtagagattatattttattatgttgtttaggttggttttgaatttttgagtttaagtgatttttttgttttggttttttaaagtgttgggattataggtatgagttatcgtgttcggtttatatgttgaagttttaattattaatgtgattatatttgaagatagggtttttaggaagtaattaaagttaatggggttataagagtggtgttcgaatttaatgggattgtggttttattaaaggagaaagagagttttttttgtttttattatgtgaggatatagtaagaaggtagttatttgtaatttagaaaggagttttgataaggaattaagttgtttagtattttaattttggattttttagtttttagaattgtgagaagataaattattattgtttaagttatttagtttgtggtatttgttatagtagtttaaggtgattaagatagtatttaatattatggagggataaattttttttttaaaataaaattaaaaatattttttaattttaatttttaaaaattagtaaattttattttagtagtaattataaaataaaatgtaaaggaaattttttaagttatatgattcgagagaaaatatttatatttattgtttttgttgtttaaaatataatttatttagaatttggtttataagttttaaaataaattgtatgaaaatatgatagtgtatttattgttaatttttgtttatgttttagaaagtttttatggaaagaaaaaaaaaatgttttttaggtagtagatatagataggttatttggggaattgataattaaaaattagagttttattttttattttttatttttttgagacggagttttgttttgttgtttaggttggagtgtagtggtgcgattttggtttattgtaatttttgttttttaggtttaggtaatttttttgttttagtttttcgagtagttgggattataggtatgtattattatatttggttaattttttttatttttagtagagacggggttttattatgttggttaggttgattttgaatttttgattttaggtgatttatcgatttcggttttttaaagttttgggattataggtatgagttattatgtttagttttagaggttttattagtatttaaaattatggatgtaatgaagtgtggagtatttttaaataagttttaagtttatgaaatgtcgtgttagaatttttttttttttttttgtatagtaaagtatttgtataattttaaatatttgtttttttgagtagtagttataaagatgatgttattaggtttggttagggtagttgttgattttttttttttttttttttttttttttttttttttttttttttaattttttttttttttttttttttttttttttttttgttttttttttcgtttttttatttttttaattatgataaaatatatataatttataatatattattttagttatttataagagtaaagtttagtattattaagtatatttatgtggttgtgtaattatttttggtaatttttttttgattttttgtttcggaattattaaatttaggttgggtttagtataatcgttgtttgtgtatttgaaaagtggagagttgttgatttttgatgggtagtttggttttgttgggtaaatttttttggaagttgttttagtatagtttagttattatttgtacggatttttgttgtgttggagtttttttgatatagtttttttagttgtatagtcgttgttatgtagaggaattaatatttgagcgattatttttttatagttggataattttgtttttttataaatatttttttttataaatagagagtgttgttttattaattttgtatttttatattagtagttttgaggttttttttaattgtttagttgtttgttgaggtattttatatttttaaatgtattgttgtttgttggtataatcgtatagttttttttgggtttatattttttttgagttttttagtttgttttaatgtttttgaggttgttgtgttagtgttgttgttttttagatttattaaaggttgggatttttgtattttttttaatattgtgttaattaggttgggcgcggtggtttacgtttgtaattttagtatttcgggagattgaggtgggcggattatttgaggttaggagtttatggttaatatggtgaaattatttttattaaaaatataaaagttagtcgggcgtggtgacgtgtgtttgtagttttagttatttaggaggttgaggtaggagaattatttaaatttaggaggcggaggttgtagtgagtcgagattatattattgtattttagtttgggtaaaaagagtgaaattttatttaaaaaaataaaataaaataaaataaaaataagaaaatattgtggtaatttgtttagaagcgttatttttttatatttagaagggtattgttatagtacggtttttattttgaaaaattagtttgtaggtatttttttgttttgggttttttattttttttttggttttgtatatggttttgtatggaggataggagggatttttttttttggtttttgaaagagttttagttagttatgtataggttttttatttcggatattatttatttatttatttatggttttttttttttatttgaatataagttttgtattaattttttaattattgtattttatgtttggtatattatgtggtttatagaaggtttttaaggaatatgtttgaataaatgaatgagaaggtttggatgtagagagtgtatattagagagaaatttagattaattttttagatttttttttaatttatttttagtgttattatttaatttagtatgttatattagaagagtaaataaatgaaagtaagaaagataggaaggaaggagggaaagaaggaaggaagggagggagggaggaagaaggaaggaaggaagtaaagaagggaggaaggaattaaagaagaaaggaaggaagagaaagaaagaaaaagaaagagagagaaagaaagaaagaaggaaagagagagagagagagagagagggaggggggaggggaggggaggggaaaggaggggaggggaagaaatttttttaaggatttttttttttagtatttttttgtgtttttttataaattgtttaatttattaatttttattatttgaagaggttggaaaaaagttggttttttgtgaattttatatttcggtgtttttagatggtggatgagaatttgtaggttttttttaggtagggatcgtgtgttgaacgttttaaagagtgatgggggatttgtattagagtgtttttgtttaagttgtttttttatgatttttttgttatttttatttagataaggggatttttttgattagtttagatgatttggatgaagttttttttttttttttttttttttttttttttgagatagagttttgtttttgttgtttaggttggagtgtaatggtacgatttcggtttattgtaatttttgttttttgggtttacgtaattttttttttttagtattttgagtagttgggattataggtatgtattattatatttggttaattttgtatttttagtagagacggggtttttttatgttggttaggttggtttcgaatttttaattttaggtgatttgttcgttttggttttttaaagtgttgggattataggcgtgagttattgtgtttggttttggatgaggtttttaaataatatatttttttttaatttgatgagatttaattatttttagtgttataatatatatagagataatgtggagtttttttaatataggttagattttattttatttaggtaagtatagttttaaaaaatattatggtagaaaggataaggtgttaagaagatcgattaaatgatttatgtattatagaagtatagttgaattagtaatcgggtttttagttgcggaggaaattgtaaatgttgagtttttgaaatatatgattttaaataaaaggtaacgatattagtagttttgttgatgtaaaggaaataagaaagatatatgtacgatgtttttaattaaatattaaaaatgtaaagtaggtgtcgtatttgattaaaaattgatattttttaggaaggattatgtttttagggtttattgtagtttttgagattatggtggagtttgtgtttataatggttttaattataggttttgagagtattttaatttttgagattatcgttatttttattatggattttgagatttttataggtttagaagttattataattattgttgtagtttttgaggttattatattttttattatagtatttgtgttattgtggttttaattatcggttttgagagtagtacggtttttgagattattacgttttttataatgtttgtgttagttatagtttttagtatagtttttagtatagtttttgagattattatgagttttgtagttattttagttttttttatagtttatgagattattaggttttttattgtagtgtttgagttagtgatagtttttattttggtttttgagtttattttggtttttattacggtttttaatattattatattttttatagtaatatttgtgtttattatagtttttattttaggttttaagaatataatagtttgtgaggttattatgtttgaaattattattgttgttattatagttttcgaggatattatagtttttatttaaatttttgtgatagttgtagagtttgtgttttatatagttattaaaatatttattgatattattatagtatttgtgttcgttatagtttttaagaataatatattttttgtgataatatttatattttttatagtttttaatatagtttttaaaattatgattatagtttttaagatcgttacgatttttacgataatatttttgtttattatagtttttattataatttttaaaattatcgtaggttttgagatttttatagtttttattatagattttgcgattattgtaatttttataaaagtttttgggataattgtagagtttgcgttttttatagtttttttaatatttgttgagattattatagtatttgtgtttattataatttttattataggttttgagaatatcggatattatatagtattatttgtgtttattatagttttcgttatagtttttgaaagtagtataggttttgagattattagagtttttatttttgttattgaagtgattatagttatgattatagttatgattataggttttgagattgttgtggtttttattaaagtttttgtgataattatatagtttgggttttttatagttatcgtaatgtttgttaagattattatagcgtttgtgtttattatagtttttattatattttattagaatattatagatttcgtgattaagtttgtgtttattatggattttattatagtttttaagagtattattttttttaagatagtatttgtgtttattgtagtttttattaaagcgtttgaaattattataggttttgagattattttggtttttattataattttaggaattattgtagtttgtgattatattggtttttagtaaagatttcgagatttttatagtttggatgataatttttgtgtttattgtagtttttattttagtttttgaaattattgaggttttttttatagtttttgagtttattatatttttttttaaaatatttgtgtttattatattttagtttttattatggtttttgaggttatattaatttttgagatttttattatttttataatagtatttgtgtttataataatttttaaaataatttttgagaatattgtaggatttttatttatgatgggttttgagattattatagtttttattataagatttgagattattatagttattgaaatttttacggttttttttatagattttgagatttttagtgtttttataatagtatttatgtttataatcgttttttttatagattttgagattattatagtttttattgtaatatttacgagtaatatggttgtgagtatagtttttgaggttattttagggtttggaagtagtatggtttttattataggttttgaggttattatgttatttatagtagtatttgtgatttttatagttttcgttttggttttatcgttttttttggtttttattatagtttttggggttattgtaatttttattattgtttttgttattttcgtgtttaataaggttattgatatttttatttagattattattaaaatagttgtgttaggtattaatttttatgttttttttgattatatatattttaattttaatggtaattattagttttttatttgtttttattatttttgttttgttttaagttaagtttgtatattgttaggtattattttttggagggtttttagaggcgaggttgagagtgtgatttatgaggagatgtattatattcgaaaagaattgtttgaattttttaatttatataaatagaaatttggagaataggtattagaatggatatgaagggtgtgggataatggtggaaggaatatagagttaggttaggttgaatttattgatttggttttattaaatagggattttgtatttaatgttgtagtttggggagttaaaaagggttttaatagtttatttgtttagttagttaaaatatggattaaaagatggtttattgtgagtaagttgattttttttggtttaatgtaaatgaagggatttaaaggtttagggagattgggatggtggagtggattagttaatttagatttatttattttagttgggagggtttagaagatatatttttgatgatgttttgtaaaatatatttgtgagggtagtatttgtatatttgaagagttttataattgtttttttttgtatgttagatttaatagtgggaatcgtcgttagttaattgtaaaatttaaatataatgggaataattggatttagaggtggtaggggttaagtggtagtatttaaatatcgaaggtaatgtgggtgtaggtattataatggatagtagaggtaaagtggtaattagaatagtttaatttatgtagagttttggtattggttaattaattatagtgtttttagaagtgaaattgataggaagtttattgtatttttatttaatttatataagtagagaatttttaggttgaatggataaaagattaatttgaattataaaaatagaattacggttttttaattaatttttagatttgagttagtttatagatttagatttttttgaatgaacgggaggtcgggtttttttgaggaaggattttattatattattaataatttgtgtagtgaattttttttttatttttttttaagatttttggttttttattagggtaattgtgtattggggaaagggaaatgattagatattttggggattattggatattggttttgagttggcgttgattttaggagatttaaaatgttattgtggttttttagttaaagtatgggtttatgagttcgggagtggtggtttatgtttgtaattttagtattttggaaggttaaggtaggtggattacgaggttaggagttcgagattagtttggttaaaatagtgaaattttttttattaaaaatataaaaattagttacgtatggtggtgtacgtttgtagttttagttatttgggaggttgaggtaggagaatagtttgaatttgggaagtggaggttgtggtgagttaagatttgttattgtattttagtttgagtaatagagtgagatttcgttttaaaaaaaaaaaaaaaaaaaaaaaaagtaggcgtttatagaagttaggtaattaatggagttttagtttaggtttgatttatagtgggtttcgtgggtttttggatttattttgtgattatttttttagtgttagaatgtataattggtatatatttagtagttggtagaatttttgtattggttttatgattggtagggtgagggttattatggtggaaaaggttgaatggaagttattagagttgtttttatttagaaaaatagtaaataaaaaaaaaaattatattttaggagggattgcggagattagtgttattattaaggatttgaaagatataggggtggtgatttttattatatttttatttagtttttttatttggtttgtgtagaagatagatgaattttggagaaggatagtggattatcgtaagtttaattaagtggtgattttaattatagttgttgtattcgatgttgttttattgtttgagtaaattaatttattttttggtatttagtatgtagttattgatttggtaaatgtttttttttttatttttgtttataggtttattagaagtaatttgtttttcgttggtaaggttagtaatatagttttattgttttgttttaggggtatattaatttttcggttttgtgttataattttatttagagagagtttgattattttttgtttttgtaagatattatattggtttattatattgatgatattatgttgattgggtttagtgagtaagaagtagtaaatatattggatttattggtgagatatttgtgtgttagaggatgggaaataaatttgattaaaatttagggagtttttattttagtaaaatttttaggggtttagtggtgtggggtttgttaagatattttttttaaggtgaagaagttgttatatttggttttttttataattaagaaagaagtataacgtttagtgggtttatttggattttggaagtaatatattttatatttgagtgtgttattttagtttatttattgagttattcgaaaggttgatagttttgagtgggatttagaataggagaaggttttgtaatacgtttaggttgttatgtaagttgttttgttatttgggttatatgatttagtagatttaatggtgtttgaggtgttagtggtagatagggatgttgtttggagttttcggtaggtttatataagtgaattatagtagaggtttttaggattttggaataagtttttgttattttttgtagataattattttttttttgagagatagtttttggtttattattgggttttggtggaaattgaatatttgattattagttattaagttattatgtgatttgaattatttattatgaattgggtgttttttgatttatttagttataaaatgggtcggtgtgcggtagtattttattattaaatataagtgatatatatatgatcgggtttaagtagtttttgaaggtataagtaagttatatgaggaagtggtttaaatgtttatggtttttatttttgttattttgtttttttttttttagtttgtatcgatgattttatggggagttttttatgattagttgatagaggaagagaagattagggtttggtttatagatggttttgtataatatggagtattaatcgaaagtgaatagttgtagtattatagtttttttttaggatatttttgaaggatagcggtggagggaaatatttttagtgggtagaattttaagtagtgtatttggttttgtattttgtatggaaggagaacggttagatgtgtgattatttattgatgtataattagtagggggtttggttggatggttagggatttggaagaagtacgattggaaaattggtgataaagaaatgtgggaaagagttatgtggatggatttttttgagtggttaaaaattgtgaagatatttgtattttatgtgagtgtttattaatagatgattttagtagaggaggattttaataattaagtggatacgatgattcgttttgtggatattatttagtttttttttttagttaattttgttattatttaatgggtttatgagtaaagtggtcgtggtgttagggatggaggttatgaatgggtttagtaatatggatttttatttattaaggttgatttggttatggttattgttgaatgtttaatttgttagtagtagagattaatattgagtttttagtatagtattattttttaggatgattagttagttgattattggattattggttggattttttttattatgtaaagggtagaggtttgtttttattggaatagatatttatttttgatatgggtttgtttattttgtatgtaatgtttttgttaagattattatcgtgaagttatagaatgttttatttattattatggttttatatagtattatttttggttaaggtatttattttatagttaaagaagggtggtagtgggtttatgtttatggaatttattggttttatgttttttattattttaaagtagttggattgatagaacggtggaatggttttttgaagttataattacgatattaattaggtgataatattttgtagggttggggtaaaattttttagaaggttgtgtatgttttgaattagtgtttattgtatggtattgttttttttatagttagtatttttgggtttaggaagtaagggatggaagtggaagtggtattatttattattatttttagtgatttattagtaaaatttttgttttttgtttttgtgatattatattttgttggtttagaggttttagttttagagggaggaacgttgttattaggagatataataataatgttattaaattggaagttaaaattgttatttggatattttgggttttttttatttttacgttaataggtttagaagggagttatagtgttggttgttgtgattgatttagattattttgatgaagttagtttattattttataacggaggtaaggaaaagtatgtatggaatatttgagatttattagggcgttttttagtattattatgttttgtgattaaggttagtgggaaattataatagtttaatttaggtaggattataaatgatttagattttttagaaatggaagtttgggttattttattaggaaaaaattatgatttgttgagatgtttgttaaagggaaagggaatatagaatgggtagtagaagaaggtagttattaatattaattatgattgcgtgattagttgtagaaagagtattgtaattgttatgagtatttttttttttttttgttaaaaatacgtttgtatatgtatatatttgtattaagaaaatatttttattttatttttttttttttttattatgtgatgtaagatttattgattttatattagtatttaagtattattaattttgcgtaatagtatatgggttggggattggtgcgttttcggttgtatgaaggatagttgtattatgttgggtataattatgattttattattgtttttatttgaagattatgtataattttaggagatgcgtatgggtttaagttgataaggggtggatttatgatggttaatattgagtgttaatttgattggattgaaggatataaagtattgatcgtgggtgtgtttgcgagggtgttattaaaggagatgaatatttgagttagtggttttagaaaggtagatttatttttaatttgggtggtataatttaattagttgttagagtggttagaatttaagtaggtagaaaaatgtgaaaagagagattggtttagttttttagtttatatttttttttcgtgttggatgtttttttagttttggaattcggattggtttttttttttttttagtttgtagacggtttattgtggggttttgtgattatgtgagttaatatttaataaatttcgttttatatatattttattagttttgtcgttgtagagaattttgattaatatattttttttttaatattggagattataatttgatatgagatttgggtagggatataaatttaaattatattattttgttttagtttaagattaaataattatgtttattttttggtattttttattagtaagtcggttgtatttgattttatttttttcgttttgagtatttttatttttattttggtgattggtgttgtttgggattttatttttattatttttgatttaggtatatttattgttattaaagttattattattgtttttgttgtgttgatttttattcgtatttgtttgagtttatttttttttgtttttgtgagtagttttttttatttgggttaggtttttttatatttgtttaagtatatttattttatttttgttgattattatagtgtggtagatgatgttattttcgttttagttacggttattggtatgtttatgaatgaatttaattttgttatttttttttttagttttttttttatatttagtgattatagttataaaagaagtagggtttgttattttgtatataagttcgtttttttttatttgggtggttattttcgaagttaaatagattttttatttttatatttattacggttacgtttttttaattttttgttttttttattattaattttattaggtgatatattttatttttttttttgtacgatatttatttttattgtgaggatacggttatagaggaatggttttttattatttttttttttttattattttttttttgagttatttttattatagatatgttagatttatttcgttttgttttaagcgtttttatttttttttaattatttttgttatgaatgtattatgttgtgtgatttttggaattagttttatcgtttttagttttgttattatggtttttggaatggattttatggtttttgttgtagttattttgtgacgggaatagttttaaatatttttgatttgggtatatttattatgggagtattatttattattttagtttttagttttaggattattataggatttattcgtgagttaattagtaatattttttagtaaataggtttaatgtttataggtataaatatagttagcgtgagttatatatttaaatatgtgattaaattgagtggatatttatagttttaggttattatgtttatttttttggttgtagttatggttggtgttggattgttagtaggattgaggttttgtttgtgagtgattgagtatggaaatgggtagagtttttttgagaagatagattacgaggaggattagaattgacggaagaagggttattagattattagtatggagaggggtttggagagttatttgtattttagtttaatcgattaagagtgtaggagtaaatgtatagttttatgaagttagatttattagttagttgtaaaatgggaggttgtatattagggagttgaggagttttttattaaataacggaaatgttattatagtattgggggaaatgttattatagtattgggggaaatgttattatagtattggaggaaagtgtggatttttggtgaaatttaaatgaaagaattttaaaaggtttaaaagaaagtagggttgtttgtaaaggggttatcggtagtttgaaattgtgaaatagattgtttttttggaaattatagttaaaatgaacgtggaatgttgtatttagagaaattttttatttgtattttagttggaattggaggttgtttttttgtgttaaagttatttagagtttttagataagaatgggatattttttttttattgatttagaattaaatagtaaatttgtaatagtttgcgattttagagaatgaaattttttattggttaaattattgtaagtgagtaggttattggaagtgagtaagggttgtgatattttatagttgtagtgcgttttggggaaaaatattttttttagtgttttttatagttggttatttatgttgttatgtatttattttttgatggatagcggtcgattgttgttttcgtagtttgatttttattgttttatatagtgtagtataaagattagggagaaggagaaagatagaaaatataaacgatagatatagtaggaagaaaaaaagaagaagaagaagaagaagaggtcgggcgtggtggtttatatttgtaattttagtattttgggaagttaaggtaggaggattatttgaggttaggagttcgagagaagtttgattaaaatggtgaaattttatttttattaaaaatataaaaattagtcggtgtggtggtaggtatttgtaattttaattattcgggaggttgaggtaggagaattttttgaattcgggagatagaggttgtagtgagtcgagatcgcgttattgtattttagtttgggttataagagtgaaattttattttaaaaaaaaaaagaggaagggggttttaagtgagaggaaagtgtttgggtatgaataggagagtattgagaatatgatggaaaatgtgttttataaaatagttgggaatgtaatattagaaaaaatatttttggaaagtgatgaatatttaggtttttaataggttttttatttttaagatagataaaattataagttttttttagggtgagagtggggtatgttttattttatgtttttatgattttatttaagtgaaaataaatttatttttttaggtattttttagtataatttaaataggttagagattttaaaattttatgaaatattaagggaagttgataaagaaatgtttttttggagaatggaggttgtagaaacgttttttttggtgtaggggagggtttgacgttttagaggttttagtttttcgtagtttttggtgttaatgtgatagttattggttagtagtagattgtgttttattgtttattttggttttaattttttatttaaatgtattttttttgttttattttaagaaatagaatatttatatttttttattttggttttatgtatttttgtatgtagttttgtaaatttgtaggaggagttagagtgagtatataatatataaatgagaaatttatataagttataaatagttaatataatttataattaatttatttgagttttttattttagagtttttgatttttttttaagggaagaataatatgtgatttattagttatgagtaattttttaaatgtttaagataaagatgtaatattagttaattagtattttattagttatttattaggtatgaggtttagggtttagagtgtttagagggtattattttttttttgttttgtttaattatttttggggatgcgtatttttattattttattttatagattagaaaattggaagtagagatataagtaatttgttgaagattataggataaggttacgtagagttaggttttaattttggttcgtttgatagtagagtttgtgtttttagttagagtgtttgtttgtttttttgagtcgaagttttattttgttgtttaggttggagtgtaatggtataatttcggtttattgtaatttttatttttcgggtttaagtaatttttttgttttagttttttgagtagttgggattataggtatgtgttattatgttcggttaattttttgtatttttagtagagatggggtgttattatgttggttaggttgttttcgaatttttgattttattatttgtttatatcggttttttaaagtgttgggattataggcgtgaattatcgtatttggtttatagtgttttttagatagttttttaatttttagttttttatggtttgttttttatttttttttatttttaaaaattgaggtgtaatttttattaataaaaaatgataagtatgtaaggtaatagatatgttaatttgatttaataattttaaaatgtatatatatattaaaatattatattgtatattataagtatatgtaatatttatttattagttttgaaagtgggaaaaatataaattgtgttttttttgtttttatattattattaatataaaatatttttggtgattaaattaagaggggaagttttttttatattaagtaagtaattagttttgtagtagatattagttcggtgtttttcgatttagtgttggtattgtttatttggagatagtattagatttatagattaagcgcgtagttttttaatattaatcgtttttttttataggttgttaagtttaggtttttggaatttttgattaattggagtaagttggagttggttatttttgtttggtttcgattaatttgtaggagtggttgattgaatttagggaaatatttttattggtttattataaaggatattataaaggatataggtgaagaggcgtggagggagaaggagtagggagtttttatgttttttttagtattttattttttaggaatttttatatgttttttgagttttggtttttggggtttttatagaggttttattatgtaggtatatttgattaaattatggttattggtaattaatttaatttttagtttttttttttttttggaggttaagggttaaggggtggtgttttggttttttcggtgattagtttttattttgtagttaatagttgatttattcgtatataaaaaaaaaaattattttttagtatttaaggattttaggagttgtatgttaggaaatgtgtagaagtttaaatatatgttttacgtattaatttaatatagttgggagaaaggttaaaagttaaattatatttaaaaataaaaagaatagtcgggcgtagttttgtaattttaatattttgggaggttgaggcggatggattatttgaggtaaggagtttaagattagtttggttaatatggggaaattttgtttttattaaaaatataaaaattagtcgggtatggtggtttatgtatgtaattttagttattttggaggatgaggtaggagaattgtttgaatttgggaggtagaggttgtagtgagtcgagatcgtgttattgtattttagtttgggtagtagagaaagattttgttttaagaaataaaaaaaaaataaaaagaataatattaattgaaaaaaataaatattgtttatagatgaaaaaattttgaattataatttataaaagtatataaatattatttgtatagtttgattaattttaaaatgtgttaatatttgtataattattatttaatttaaaatgtagaatatttttattatttgagtagtttattttgtggttttttttagataatatttattttattaaaggtaagtattattttagtttttattttatgaattttaaaaaaaattttttattttaatttttggatggggttttattttgttatttaggttggagtttagtggtgtcgttttggtttattgtagtttttgtttatttagagatagagttgggtttaagtgattttttcgttttggttttttaaagtattaggattattggtatgagttattgtatttggttttatgaatttttatttatttttatttgattttatagatatgtaatttttttggttgatttatataataaaagattttttatttttagttgattttgtttttaggtataggatgtaaatttattttgttttgttttttttatttttgtagagatggggttttattatgttgtttaggttggtttttggaatgtttgggtttaagtaatttatttattttagtttttaaaagttttgggattataggtacgagttattatgtttagatttattttgttttgaaagttgagtagtatagatttttattaaggtataagtatattaattaggaagattgttttttttaataaataaataaataagaggaagagagttttaaatattatttatatatatatatatataggaagatttgatgagaaaatagataatattgaaaagtgaaaatttatgaattttgataatttaaggtttaatgataagaaagaaaaggagttaattattaatatatatattttttttttttagaaggatttttttttattttgataaatagaggtatttataatttttatgataatagttttgattttggtttatatttggatttagttttgggttttgggatattttatagtttgggaaatgtatttatttatggagggggatttgagatgggatatataggaatatatggttttggatatggagtgggttatgagttgagttatagttatggagatggttgtggagtgaattatggtgggcgttatggatttggaggaggttatagtaataattatgaaatgtattatagagaaggtcgttaaggtaaaggagagtatagatatagattggataatggaaggtgttatggaaaagaaaattttggggaagaagggggattatggaggagaaggtagtgattataaaatgggttaggatgggtttttttgaggtttttaagggattggttatagagatggttatgattaaaattaagaaaagaattagagaaaagagtatagagggtttggttaacgggatagttagaaaaatagggagtggttttggaggagatttgtagttttattagttttgggtgtgagtttaagtgaaaatattttttgagtataattatggttttaatttttgtggggaggaggggttacgatgattaagtttagaataatttttttttgattttttaatatataagttagaattttttaggttttggttttttatcgtttttttaggatggaatttgattagtaggaggaagaataagattattatagtttataataatggagtgggtaaaaaattttttttgagaatttgtaattatataattttttttatttggatttgtaattttaaattttataaattgagtagattagaaaattttgttagatttatttagtgttttttagttttttatttttgggaagagtttttttttttatttttttgttttttttaaatgttatgtgataagttagaagaaatttattgggatagtgttataaattaaaattttaaaatatatttggtatttatgtatttatgtatttatgtttgttttttttattttttttttgttttttattattgtatgtttattaagtgttaaatattatgttagtgtttgtaaatatattattatttattttttaaaataatttaatgataatttaaattttttgttatataatggattacgtgttttgattgaaaatatattgtaaagttaagttatggattttaaaatttttttaaaagagttagtgaattggtatgaaagtatggaatgttaaaattaaagattaaataggatttaggaggtaagggaagtattgaagttaatttttgtaaaatttaaagaatttaagtttcgggtattatagttttagttggattagtttaaggttatgggtggggaggaattatataaatttgtaatttttagtgagaatgtaaattaaaaataaatttgttttttttttaaggaaatgtaagtaaaattgtttgtttttaaatttggtgtagaggagggtagagggagtattttttgagaaataaattgtaattataataattaataatattttatttatatggtttgtagttataaattatgtagtttaggtaatttaaaagatcgtaattttatagtttagtttaaaataattattaaattatatagtatatatatgtattaaaatattaaattgtattttataagtatatatagtaataatgttaataaaatattttaattaaaaatataataataaaataatttttaaatggtaatgtttttatatgtttggaaaaaatatgtaaattttttgtgaaagatcgtagtttaatttgtaattttagaaatttgggaggtcgaggtagtaggattgtttgagtttagaaggttaaggttgtagtgagttatgttagtgttattgtagttttgatttcgatagataatattttaagaaaaataaatttatagttatgatttttaaattataagtgaaaatagatattttgagtgaaaattagtaaggaagaaaataaaattaaaaagttagatagtagtattagatttttaaagattttaggtattgaaattattaaatatagaatataaggtaagtaggtttaaatgtacgttttggttttatttttaattttttttatttttattttttgtggtatatagtaggtgtatatatttatggggtatatgagatgttttgatataggtatgtaatgtgaaattagtatatcgtggagaatggggtatttatttttttaagtatttattttttgagttataaaaaatttaattatattttttatgttattttaatatatataattaagttattatttattatagttattttgttgtgttattaaagagtaggttttatttattttttttaatttatttgtttttttaaattaatttaatttatttaattaatttatttattaattatttttattttttttagttttttttattattttttttagtttttggtaattatttttttagattttatgtttatgagtttagttgtttttgatttttagattttataaataaatgagaatatgtaatgtttgtttttttgtgtcgggttttttatttaatataatgatttttatgtttagcgatgttgttgtaaatgattggattttattttttttttatggttgaatgatgttttattatgtatatgtattacgtttttttttttttttttttttttttttttttttttttttcgagatggagatttgttttgttatttaggttggagtgcgggtagtggttcgatttgggtttattgtaatcgttgttttttaggtttaagtaatttttttgttttagtttttcgagtagttgggattatagatgtttgttattacgttcggttaatttttgtatttttagtggagatggggttttattatgttggttaggttggtttcgaatttttgatattatgatttgtttatttgtgttttttaaagtgttgggattataggtatgatcgtgtttggttttttttttttttttttttttgagatggagttttattttgtcgtttaggttggagtgtaatggtataattttggtttattgtaattttcgttttttaggtttaagtaatttttttattttagtttttcgagtagttgggattataggcgttcgttattatattgggttaatttttgtatttttagtggagatgggattttgttatgttggttaggttggttttgaatttttgattttatgatttatttatttcggttttttaaagtgttgggattataggtgtgagttattgcgttcggtttgtattatattttttttatttatttatttattaatagatatttttaaattttagttattgtaaatagtgttgtaataaacgttggagtgcggatatttttttgatatattgatttttttttttttggttatttttttagtagtggggttgttggattatgttacggttttatggttgtttgttaatatttattttttatttttagtaatagattttttaagtgttagttgagtatacgtttatttagttagagatagttttttttagttttttttgtagtttaatatggttgtgtgattgcgtttaggttgagggtgtgtaagtagataataataattttttttttataataattttttatgaagttaataaataagaaggaattaaaatatttgatgatattagggtatgatttgggagatgggtaatacgaattaaaatgttttgaggtttttgtgttattttgatagcgagtaaagatattaattatattaggttttgataagtatgcgcgttataatttttagagtattttttaaaaggtgaaatttggatttgaatttaggattttagtttttaaataattttggaagaagaaaatttttagagtgttattggttttttagttgtagaatattggtatattagaagaattgttgggagtttaggatttaatttgttattgagcgttttcgtatatttgattttttggaattttttattatagttattaggtagatttatttttgagttttttttagtatatcgttgattttttttgtttttttagtttatttatttagagtttttttatgtttttagttattttttgtttgttagtttttttttaatagaatttgtatgttaggaaagttcgttcgtttataaataaattatttgagagattgtgttttttaggaagtttttcgttattgttgggggaaatgtagataatttattttggttattgtaatggtttggatgtggttgttaaattttgttaagttttatgttgaaatttgatttttaatgttggaggtggagtttggtgggaggagtttgggtggttgaaatagattttttatgaatagttcggtgttatttttaattagtgagtttttatttttagtttttataagaattggttgttgaaaagattttgttattttttttattttttttttttagttttttttttttcgttatatgatttgtgtaaatcggttttttttttttttcggttacgagtggaagttttttgaagtttttattagtgtagacgttggtgttatgttttttatatagtttgtagaatcgtgaggtaaataagttttttttttttatgttatttatagttagggatttttttatagtaatattaatggattatgatagaaaatatagattgtatattggaattttattagtttggttatagatgttattttagatttttttaaattttttgtttatttgggtttttttagttacgtttttttagttgattgttttttttttgttggttatatttaagtgtttagattaaatttaagttttttttaggatttggattgttgatttttttttttttattagattgtgtttcgatatggtattgtgtttttttttaaggtgtgtatttttttgagagacgtttttttggaattgatgttaaggtatattagaaggattttagggtggaaaggtttttatatagtcgtttgaaaataaaaataaaatagaggggagtttttatggttgagggttagaaggagattttatttttttttttttgttatgagtttgatagggggcgtatttaatatttttttatatttttagtttttatgttttagagattttaaatatgtttttattatttttttttattatgttttttggatttttttttttttgtttttttaatgtgtattgttgagtgtttattgtatatttagtaatattttatttgttttttgtttataatttaggagtttagagttttagttattggttttttttgcgttatttattattgtttgttgtagagatgtgaggttttatttttttggtttagtttattagggttttttttatgttaaagtaggtttataggattttttgattagaaaataaatttttgagttgtaataggtttttaattcgatttttgttttaaagggtgggttttttttattttgataattatgatttttttattttattttattttttgttgtaatttagttaagtattttgtttagtgtggttatgttattttttttttttattttttttttgatttttgttttatttcgttttaggtttggtatcgtttttttatttgtttgtagttggtagattgttaggttaattgttttatttttttttagattatatgaagttataaaggtttttgtagtttttttataatagagaaagaggtaattatattgtttggaggaagtttaaggaatttaggtatttagttgtttacgtttgagtttaagattttttttaggaatataaacgtaggagatttacgtttttggaagtattagtttttatttttttatttttaagtttttttttttaagaattttttgttttttgttttttaaagttttggtatatttaggatttaggtattttgttttttagttataaagagatagatgaagatgtagaaaggaaatgttttttttatgtttggtttattattgtatttagaagttggtgagtgattttatttaaaatcgggtggtttgagaatttttgaggagttgggagagaaatgtgattattattggggttagttttgttttttttttatagagtgaggattattattttattcgaattattttagtttaataaggtatgttatgtaggaagtagttagatatagtggttaaaattgggttttggttttatattgtttatatttgaattatggttttatttattaattgtgtattttaggttagttgtttttttgcgtttcgatttttgtatttgtaaaatggtaataatttgtgtaatatggttggggttttaaatattaagaataagaagagtcggttgtttttaaaatgttatttttttggcggggtgcggtggtttatgtttttaattttagtattttgggagggtgaggtaggtaggttattgaggttagaagtttaagattagtttagttaacgtggtaaaattttgtttttattaaaaatataaaaattagttgagtgtgttggtttgtttttgtatttttagttatttaggaggttgaggtaggaaaatcgtttgaattcgggaggcggaggttgtagtgagttaagatggtgttattgtattttagtttgggtgacggagtgagattttgttttaaaaaaataaaataataaaataaggttaggtttagtggtttacgtttgtaattttagtattttgggaggttaaggcgggtggatgttttgaggttaggagttttagattagtttggttaatatggtgaaattttatttttattaaaagtataaaaattagtttggcggggtggtttatgtttgtaattttagttatttaggaggttgaggtaggagaatcgtttgaacgtgggaggcggatgttgtagtgagttgagattgttttattatattttagtttgggcggtagagtaagatttcgttttaaaaataaataaataaataagtaataaaataaaataaaataaaataaaataaaataaaataaaatattatttttttatattttataaatttaattttttttttatttttatatttaatttttcgttagttttttacgtataggttggggaggttgaatgtttttatttttttgggaaattaagggtaaaaatttgatataattttaattttagttaagtttttaagaagttaaaagttttttttttatttttagacgttggtttatagtttttatttttgggagtttttatgtatttgagttatatataattcgtttttttttagttttggttatagtgattaagggtttttggaatttgaatgtatatagttatttggttttttgttgtatatgtagatttttgggttttattttaaattttaatttatttagtttggaatgatttgtttaagaatatttttaatatgtttttttaagtaattttgaaataagtgtgttttgaatattattttgagaaatattttttaagaaggaagtaatattatttaagaaaaaaattgattagtatatattagttttatttagttttataatttttttataatattttatatttgtattgtattttgtatagtagaatgtggaaaaaggttagttattagtgaaattagatgatgtaattttggtattgtgggtgggtggttgatttagtttagtttttataagtgtagatttagtagtttgggtttagttttttgttttattatttattagttgtgtaaatttgggttagtgttaatttttttttattttttatttttgagacggagttttgtttttggtatttaggttggagtgtaatggttcgatttcgatttatcgtaatttttgtttttcgggtttaagtgatttttttgttttagtttttcgagtagttggaattaatgttcggttaattttgtatttttagtagagatggggtttttttatgttggttaggttggtttcgaatttttaattttaggtgattcgtttattttggttttttaaagtgttgggattataggcgtgagttatcgtgtttagtttagtattaatattttgaagttttaatttttttattttagttggtgataataatagtatttatgttatagtattatagtgagtattaaataaaattatgtaatgaatttagttaagtaataagtagaaagtatatatatataatatatatttgttattatatgatttttttagtaataaattttaatgagattagtatttttgttaatattggatttagtgtgatttttagtggagttagtatagttattaattttgggtttagtgtgatttttagtggggttagtatagttattattttagggtttagcgtgatttttaatggggttagtatagttattaattttgagttttatataatttttagtgggattagtatagttattaattttgagtttagtatagtgtttagtgggattagtatagttattaattttgagtttagtataatttttagtggggttagtatagttattaattttgagtttagtatattttttagtggggttagtatagttattaattttgattttagtataatttttagtggggttagtatagttattaattttgattttagtataatttttagtgaggttagtatagttattaattttgagtttagtataatttttagtggggttagtatagttattaattttgagtttagtatagtgtttagtagggttagtattgttattaattttgagtttagtataatttttagtggggttagtatagttattaattttgagtttagaacgatttttaatggggttggtatagttattaattttgagtttagtacgatttttagtggggttagtatagttattaattttgagtttagtatatttttagtggggtcggtatagttattaattttgagtttagtacgattttagtggggtcggtatagttattaattttgagtttagtatagtgtttagtgggattagtatagttattaattttgagtttagtatattttttagtggggttaatatagttattaattttgagtttagtacgatttttagtggggttaatatagttattaattttgattttagtataatttttagtggggttagtatagttattaattttgagtttagtacgatttttagtggggttagtatagttattaattttgagtttagtataatttttagtggggttagtatagttattaattttgggtttagtacgatttttagtgggattagtatagttattaattttgagtttagtatagtgtttagtggggttagtatagttattatttttgagtttagtacgatttttagtggggttagtatagttattaattttgagtttagtatagtgtttagtggggttagtattgttattaattttgagtttagtataatttttagtggggttaatatagttattaattttgggtttagtgtgatttttgtaggttttggaatagtagttttgattggaatgtatataattttttatagtgtatttattgtagtgagtgaggcgaagtttggtgggtttttggtgtcgtgggaaattttttttattattttggtttcggttgtggcggtcgtggggttttttgttgggttttttttttgtgtggtgagtgtttaatatgtaagaaaatgtttgggggaaggagtagtagaaatataaggaaatgggtgtgaatagaaggggttttaagttaggggtgggtagggaggaagggagattaggaaagagtaatatagagatatggtaggttaatgtagaggaagttgttgatttgcgggaaaagggggttatagaaaggattggagaaaggagaattaggtaaagagtgtggttggaagtgggagaagattttagaaggcgtacgtggtaaaggcgtgggagatagggatgtaattttgaaattattgatttttttttttttagagaaatagtttgtttttgagaaatatttttaatatagttgtttattatttttatggttttaattatggttttggtttaggttttggagggaattatggagttttttataggtttaggtggagttttaattggttttggaggagattagtattttcgatagttatggagatgagcgggaggaatagcgggttttgagtagtttcggaagtaagtgtcgtattttttaggaaggaagagatttgggtatttaagatttggtttttttttatttattttaggagattttttttagttttgtttgagattttgaaaattttgaagaaggtattttttattttttttgtttttattagatattggaaagagaatattatattgtttatttagttaagaaataaatatattttatttaatatatacgataaagagaagttgtgcgtgtttcggggtgggtatttagttttgagatgaatttagttataggagaaaatttttatgttggattttatttggtatttaaaatttttatagtaaaatttaaagattttatttttatttgtgtgtttgtattttttaattttttttgttttaggtaaggtttttgtatttttgagatatttcgattggttggagaattgatttgggagagataaggagggagggcgggtgttagtatgttatgggtttttgcgtgaggtttgtggtatatagagattaggttgtgatatatgaagagttaagagtaggatgaggtggaggcgttataattatttgttttgtgtgtggggggggaggggggaggggggtacgtatatttatttgaagtcgaggtttttagggtatttttatgtgttttaggtttgattatttattagggtggaggagttggtgatatttatttttttgagtgttttttggttttttaagggaaagattttttggtttgttgaggtcgaattttttaagaggtttttgtaaagattcgagatttttataaattttcgtttagaagagttgtacgtattttttttatgagtttagggaagagggttttttaggttttggaagatagaggggagttgttttagaggttaagttgttttgagtttataaggtaatggagggtttttatttgggatagagtttttagtagagaattagtagtttgttggtgggtttattttaatttatagtagtagaaattgttttattttttattatttattgggtttttttagtgttagtaaattaaagaattggattttattaatgcggttataggaaaatagtttgttgtatggtaagagtgatattattttgaagtgaaattattataatggttattttttttttagatggagttttgtagtggtgtaattatagtttattgtagtttttaatttttgggtttaggtaatttttttgttttagttttttgagtagttgggattatagtttcgtgtgttattatgtttggttaatttttagaattttttgtagggatagggttttattttgttgtataagttggttttgaatttttggtttttttgaattttttttgttttggttttttaaaatgttgagattataggtgtgagttattgtatttcgttagatgtttaatgtttgatttttgtatattaaggtgttttgtattaagggttttaaaataatgtttgtagcgtaattaattttttataaagatgtttatttaatttttttagtagttatgggttttagtaagaaagtttgtgatgtgattagttgtatatgtttttttttaaaagtttattttagaaaggatattttttggagagggagtgtgggaatttattattttgtggttattttagatattatttttttttggaagattttattaaatatttttttgtgagaaattggatttgttagtttttttttttgattttttttttttttaaaatttaggggtaggtttgtgtagatttgtttatggtagaatatttggtgattttttagttagtagttgggagaataaggaatgggtaaggagaatgaagtatttgtaaggaaattttagggcggtagttacgtttgtgtagggttggatggtataattgttcgatatttgtgtatttttgtgtgagtgtagggatgttttgaaaatgttaggtggtttagagtagttattaattgaaagtcgtatagtgtattggggtacggaaggtcggttaatagttattgtagagggttgggtgttttttttggtaatgaagattcggttagtagtagaagttaaaattaaatgtttagagaaggaattgtaattagaaaaagacgtgtatttttttatgtttttttttatatttaatttagtaaataaaattgaagattaagagataaaaattgaaatgttagtatgtagatttgtttatttagggcgaaagatatggaaatgattaaaaattagagtttttatgagaaagtttaatcgggatgtgaaaatttggaatttttgggattgttatgaagaggaagattgatgatatagaagttataggtgtggagggggatggggattattggtaagttcgttgttttatgtaaaggaaagtgaaatttaatattggtagtaaaacgggggttagttgatataggagatttttattgttagggaatttatcgttgtagaatttttagagattgtaaaggtttttaaataattatcgaggaaatttttggttgtttggatggtttgattgtgggatataggggttgatgatatttttttaataggagaagtagaaaaaatgagtaatattattatttatgtagttttgtagaagtatttttgttaaggtaaggtagacgtaagggagttatagtttatggattggtttattttagttatgagggaggtttgatttaatgagggaaatttatcgggaaggatgattttttggtagttaatagaaaaggtttaagggtttttttaagaattaggaatgagttaagttatttatgtttgggtttttataggatttaaaatagtttttttttgtagggatgaaaaataaattgttgaagggtgtattaggagaatggtataatttttggtttatgttattgagttttataaatgggataagaagtatatgatgtgggaaggttaggtataggggtttatatttgtaattttagtaatttgagaggtcgaggtaggcggattatttgagatcgggagttcgagattagtttggataatatggtgaaattttatttttattaaaaatataaaaattagttaggtggtgtgtttgtaattttagttatttgggaggttgaggtaggagaattgtttgaatttaggaggtagaagttgtagttagttgagattggggtattgtattttagtttgggtaatagagtgagatttcgttttaaaaaaaaaaaaaaaaaaaaaaaaaaagggttgggtacggtggtttatgtttgtaattttagtattttgggaggtcgaagtggatggattatttgaggttaggagtttaagattagtttggttaatatggtgaaattttttttttattaaaaatataaaattagtcgggtatggtgataggcgtttgtaattttagttatttgggaggttgaggtaggagaatagtttgaacgtgggaggcggaggttgtagtgagtcgagatcgtgttattgtattttagtttgagtaataatagcgaaatttcgttttaaaaaaaaaaaaaaaaagatgtatatgacgtaggagaagttattatagatttgggagttattgagaaagttagggacggggtgtgttttgtaattcggtaagggttgataaaggggaaagataatgttttataggaagaagggggaaaataagggaaagcgattaattagagttaagaataggtaaatgtggtatgatttattgggagtagaaaaattttgagaaaaaaatatgtaaaaaatgttaaaatatggaaaatatgaaaaatgttgtgttagtagttttatggagggaagtatagattgaagggttgttttgtttttttatttttgtttttttagtagaagaggaagatgatttaattttttattttaatattttagtttattagagggggattttatgttgggtttaagattagtagtgggattaaggttaattttacgttgtaggtgattagaggttttatattgagtttattatttattgttttttttaaaaaaataaggagaagattatttttttagtagatattagggtagaatatattttaatttatggaaatttataaatatattttggttaatggtttgttattattggttatggggataaacgatttggatgagaaggattttaatatatttaggtattggggaagtttttttgttttatatgtggtgtttattttttttattttagaaaatattttaggtataggtattttgttaggaaagatttagtaaattttagtggaaaaatttagatcgaaggtgtatgtagtgaagattgttttttttttttttttttttttttttttttttttttatttatttatttatttattttttattgattatttttgggtgtttttcgtagagggagatttggtagggttataggataataatggagggaaggttagtagataaataagtgaataaaggtttttggtttttttaggtagaggattttgaggtttttcgtagtgtttgtgtttttgggtatttgagattagggagtggtgatgatttttaacgagtatgttgtttttaagtatttgtttaataaagtatattttgtatcgtttttaatttatttaattttgagtggatatagtattcgttttagagagtatagggttgggggtaaggttatagattaataggattttaaggtagaagaattttttttagtatagaataaaatgaaaagttttttatgtatatttttttttatatagatatagtaattattcgattttttaattttttttttattttttttttttttttattttataaaatcgttatcgttattatggtttatttttaatgagttgttgggtatattttttagacggggtggtggtttggtagaggggttttttattttttagtagtggcggttagttagaggcgttttttatttttcggacggggtagttggtcgggcggggggttgatttttttatttttttttcggacgggttggttgtcgggcggagaggttttttattttttaaacggggtggttgtcgggcggaggggttttttattttttagacggggcggttgtcgggcggaggggttttttattttttagacggggcggttgttaggtagagggtttttttattttttagacggggcggtcgggtagagacgttttttattttttagacggggtcgcggttgggtagaggcgttttttatattttagacggggcggcggggtagaggcggtttttatattttagacgatgggtggtcgggtagagacgttttttattttttagatgtgatggcggttaggaagaggtgttttttattttttagatgggatggcggtcgggttgagacgttttttattttttagattgggtagttaggtagaggggttttttatattttagacgatgggcggttaggcggagacgttttttattttttagacggggtggcggtcgggtagaggttgtaatttcggtattttgggaggttaaggtaggcggttgggaggtggaggttgtagcgagtcgagattacgttattgtattttagtttgggtattattgagtattgagtgaacgagattttcgtttgtaatttcggtatttcgggaggtcgaggttggcggattattcgcggttaggagttggagatcggtttcgttaatatagcgaaattttatttttattaaaaaaaatacgaaaattagttaggcgtggcggcgcgtgtttgtaatcgtaggtatttcgtgaagattgtttttgagagaggaagaaaatgggagtttttataattttttgtttttatatggcgttgttaatattaaatgatttatattgtttagggggtatgttgaaataagtgtaattattatttttttaataagtgtaattattatttatttagtataaagtttatgaaagagttttgttttttttcgtattttcgtttttttttttagttttgttattttgttggtattatgttagtcgttgaagtttttattgtgttgtagttatggtttttttttttttaatttttattttaagttcgggggtttatatgtaggtttgttatataagtaaatgtgtgttatgggggtttttttgtataggttatttcgttatttagttattaagtttagtatttattagttattttttttgattttttttttttttttattttttattttttgataggttttagtgggtgttgtttttttttatgtgtttttgtgtttttattatttagtttttatttataagcgagaatatgcggtatttggttttttgtttttgtattagtttgttaagaataatggtttttagttttatttatgtttttgtaaaggatatgatgttgttttttttgtatgattgtatagtagtttatgatgtatatatattatattttttttatttagtttatcgttgatgggtatttaggttgattttatgtttttgttattgtgaatattattgtaatgaatatatgtatgtatttttttttttttttgagatggagttttgtttttgttgtcgaggttagagtgtaatggtgcgattttagtttattgtaatttttgtttttcgggattaagcgatttttttgttttagttattttagtagttgggattataggtatgtggcgttacgtttatataattttgtatttttagtagagataggggtttttttatattggttagtttggtttcgaatttttgattttaggtgatttatttgttttagttttttaaagtgatgggattataggtatgagttatcgtgtttggttacgtttatgtgtttttataatagaatgatttatatttttttgggtatatatttagtaatgggattgttggattagatggtatttgtttttaagtttttgaagaattattatagtgttttttataatgattgaattaatttatatttttattaatagtgtataagtatttttttttttttataatttcgttagtattttttattttttgattttttaataatagttgttttgattggcgtgagatgatattttattgtgggtttttgtttgtttgttttgagatggagtttcgtttttattgtttaggttggagtgtaatggtataatattattgtggttttgatatgcgtttttttaataattaatgatgtttagttttttaaaatatgtttgttggttatatgtatgtttttttttgggaagtgtttgtttatgttttttgtttattttttgatggaattgtttgtttttttaaaataaatttgtttaagttttttatagatgttgaatatgagttttttgttagatgtatagtttgtaaaaatttttttttattttgtaggttgtttgtttattttgttgatagttttttttgttgtgtagaagttttttcgtttagttaaattttatttttaatttttttttttgttgtaattgtttttagaattttcgttatgaaatttttgtttatgtttatgttttgaatggtattatttaggttgttttttagggttttatagttttgggttttatatttaagtttttaatttatcgtgagttaatttttgtgtaaggtgtaaagaaggggtttagtttgaattgtttgtatatggttagtttgttattttagtatcgtttattgaatagggaattttttttttattgtttgttttcgttaggtttgttgaagattagatagtcgtgggtgcgtggttttatttttgtgttttttattttgttttattggtgtatgtgtttgtttttgtattagtattatgttgttttggtttgtagtaatgttttatggtattgggtgtttatttatggaatggagatgggttattaatttttagaagatgtaaggtttagagtttatagtgaagattttttgtttgtttgttttgttttgttttgttttgttttgagacggagtttcgttttgttatttaggttggattgtaatggtgcgattttgttttattgttattttcgttttttgggtttaagcgatttttttgttttagtttttcgagtaattgggattataggtatttgttattatgtttagttaatttttgtatttttagtagagatggggttttattatattggttaggttggtttcgaatttttgattttgtgattcgtttattttggttttttaaagtgttaggattataggtgtgagttattgtattcggtttatagtgaagtttttaggggttatatggttgggtaatatttttttgatattgggtgtaataattgataaagtttaataatgttaattttagaaatagttaaagaaatttaaatatttgtgggttttttgggttattggagagtatgtattttatatttagtatagtttttgagatttttatatagatttattagagaaagggtatattgggtttgggatatattatagtaggaagttttgaataggttgaagtgttggtatagtaggtataggttttaggtatttttttggagggtatagttaggattttggatgttattgttgtttttgaggatatgagtggggttttatggtaatcgtagtttagggaattagtttttttaagaaaggagttaaaattagatatttttttgttgaataagaagtgttagtagtagagaatgttttatagtaggtggaattgttaataaagattttttttatgattgtgagaataggtttattaattaagggatggttagaaggatttttaaataatttattttcgttgtagttttaatatttattttgaataaatggtatgattatttgtaataaggaagaatgttagtaatgagttttttaagtttagaattatatattgtattaggttttgttatgacgtgaataaataaaggatattatttgattttttttaattttagtatttgatatggtaagtatttagatgatgtttggtgtatagaggattttagtaggggaaatcgttgtttttggatcgttgttgttatatagttataaattgatataatttggtttgatataggtgggtattagaggagttattgggatgagttgtaagtagtttggttaatagttatatatgagtttggtttttggttttttgtattgatagttgagttgtatttaaaggtttaattatgtggttggtttaataggaattagaaaagtggatgattatgtataaatttatatggggtatgaatatgtggtaagatatacggaaaaagtcgtaaagttttgtggttgatttaattgtattttaggtgattgtatataaaaattatttagttttataaaatatggaagttaaaattttaaaaaaaattagaagtattatgttagtttaggtttttgaattattgatttgggtatataataaaagtggttatagaagtgtaagagtaggttgggagatagttaaggaagtaggattatttttaaaatgtagtgattaggttgggtacggtggtttatgtttgtaattttagtattttgggaggtcgaggcgggtaaattatttgaggttgggagttcgagattagtttgattaatatggagaaatttgtttttattaaaaatataaaattagttgggcgtggtggtatgtatttgtaattttagttatttaggaggttgaggtaggagaattgtttgaattcgggaggtggaggttgtagtgagtcgagattacgttattgtattttagttagggtaataagagtaaaatttcgttttaaaaaaaaaaaaaaaaaaaaaaaaaaatatatatatatatagtgatttagttttggtatagtggtttatatatggggaggttatggtgggacgattgtttggggttaggagtttgagtttagtttgggtaatatatcgagattttatttttataataataataaaaaatatatagtgtttttttaatagtttttataaattgtttattatgttttttattgtagattatattgagtaggatatatttagatatttagaaggttgtttattatgtaatagattggtaagtggattatttagatattgtttttgtaagttaaggaaataaatatatgttaatttgtatggatatcgttattggattgttgtaagattttttttataagtaagttaattaagttagtattattaaaggtttagaggtttttagtattatgtatggatatatttggtatattgatagtgatcgagggatttatttcgttggatatgatatgtaggattgggttaggaaatatgatatattatggtatttttattttttatagaatttttaagtagtagggttaattgaaagaaatattagtttgttgaaagtataaatttaaattttaatttgggaaatttattttgtataggtagatgaatgtgttatttttaatttttatttttttaaatttagttaaagtagggacgtttgttttatgtgatcgtttaggataacggttttttaagtttattattgtttttataggggtaattgagacgattgttttgtttgtttttagattttattgataattagtgttttttgtatatgaagatgttagtagatatattatcgaggaggaaatatatcgagtttggaacgataaatagttttaggttggataggttattttttgttagagagtgataatattttaaataaagaataaaataatttgatatttaaaaataggttgggtttatttggttaatttcgttttttggttatgttagttaatttgttttttagttttgggaataaatgaattattttaaagatatttggttaaattgtataagggatatgtgatggatagtaagagattgatttttatatattatgttataatataataaaatatttattgggtatgttatagaacggatattgtgtgtaggaattttttggttggttttaaatggaattttttggatatgtggtattaatttatggttttggttattttttgtatgtttaggaagatgttttttggattatatacgggtatagattgaatagtttatatattataaagtttattaattttttttatttgaaattttattggttttgatttgttttttattggtatgattgtttggtttttatttgttttttttattcggttattgaagatattatttggtatatagaaattttataaagtttgtaatttttgtattttgggaggttaaggtaggtggattagttgaggtcgggagttcgagattagtttggttaatacggtgtaattttatttttataaaaaataataaaattagttgggcgtggtggcgtatgtttgtaattttagttatttgggaggttgaggtaggaaaattgtttgaatttgggaggtggaggttatagtgagttaagatcgtgttattgtatttttgtttaggtgatagagcgagattttgatttaaaaaattaaaaaaataaattttataaaaaataaaaaaaaagaaaattttaaatgatagttgtatgggaattttttttttaaatatggaagttattgttatgagaaagtttgtttttttaaattattaggttttatatatatttacgttgtataacggggtatttgtgtaattggaaaaattgttgtgtttatatttttgatgaattagttaatatcgttaaattaatgattgatataaaagtttatataattaagtttttagatttttattttgaataattggttttatagttggtttgggttttggggtatttggtggtataagttgttttttggtttaggtgttgtattcgtacgttttttattgttttgtttgagtttttattgttgttgtgttatttgtttttagtggagttaacgtattgttgttaaagttatgtattattaagggttttttttttaggtttagggattattatggaagagatgagtacgtgaaattgttagggttagttttgagaggtggagtgtaggaatatagtttgttgtacggtaatagggacgttattttgaagtaaagttgttattgagaggtgatagggtgttggaagttcgtatagtttttgttcgtttttagcgttttttttgtttgggtttttattttggcggtatttgaggagttttttagtttatcgttgtattgtggaagtttttttttgggttggttaaggtcggagtttatttttttagtttgtagggaggtgtggagggagaggtgcggagggagaggtgcgagcgggaatcggggttgtacgcggcgtttgcgggttagttggagtttcgggtgggcgtgggtttggttggttttgtcggttttgggtaatgaagggtttagtattcgggttagtagttgcggacggtgtattgggttttttagtagtgttagttcgtcggcgttgtattcgattttttattaggttttagttgttttttcgcggggtagggtttgggatttgtagttcgttatgtttgagttttttattttttttatgggtttttatgcggttcgagttttttcgacgagtgttattttttgttttagggcgtttagttttatcgattatttaagggttgaggagtgtaagcgtacggcgtaggattggtaggtagttttatttgtagtttcggtgcgggatttattgggtgaagttagttgggtttttgagtttggtggggatgtggagaatttttatgtttagtttagggattgtaaatatattaattcgtattttgtatttagtttaaggtttgtaaatatattaattagtattttgagtttagtttagggttcgtgagtttattaatcgatattttgtatttagttgttttggtggggttttgaagaattttcgtgtttatattttgtatttagttaatttggtggggacgtggagaatttttgtgtttagtttagggattgtaaacgtattaattagtattttgttaaaatagattattcggttttattaattagtaggatgtgggtggggttagataagagaataaaagtaggttgttttagttagtagtggtaattcgttttggttttttttttgattgtggaagttttgtttttttgttttttgtaataaattttgttattgtttattttttgggtttatgttgtttttgtgagttgtaatatttatcgtgaagatttgtagttttatttttgagttagcgagattataaatttattagaaggaagaaattgtgaatatatgcgaatatcggaaagaataagttttagacgcgttattttaagtgttgtaatagtaatcgcgagggtttgcggttttatttttgaagttagtgagattaagaagttattaattttggatatattatgatgattagtggtttatttttgtatagtaaagtgtattgtagtatagtttttaaataatgtttgttgtataaataattttttataaatatgtttttttaattttcggagtggttatgggttttggtaagaaagtttgagatgtgattagttgtatatattttattttaagattttgttatagaaaggatgttttttggagtgtttatcgttttgtagtttttttagacgtggtttttgttgtttagtttttgtttaaaattttttttggagaaattggatttgttagttatttattttatttagtttttgttttataaaagggttatatatgtaaagtggtttttaaacgttgaaggagtcgagaaattaaaaataaggtagatagatttagtttgttagtaaatggtgatttgttggggaatttatagatagaagtgtagttttgggtggtagtaagttaggtagatttttatatttgttatttttagatttagggtttatttcggaaagggtgtatattttttgtagagataattaaaagtaattttttagaataggtaggaatgttatgtgcgtcgtagtttgtaatttatgttataatattaaggttgttttgatttaaaggtaggggttggatgtggtggttaatgtttgtaattttagagttttgggagggagaggagggaggattgtttgggggtaggagtttgagattagtttgggaaataaaataatattttatttttataaaaaagaaaattaaaattagttgggagtggtagtatgtgtttgtggttttagttatttgggaggttgaggtaggaggattattatagtttaggagttagaggttgtagtgggttgagattgtattattgaattttagtttaggtgatagagtaagattttgtttttaaaaataaaataataaataaaaaacgaagataggatttatagtaagtatatgtttttattaagaatagtaaataaagtaggaatgaggtttatgtgatttatgggatttgggttaattagaagttaatatggtagattagtatttaagatggagttattttgtttttatagttttttagtttttttagtttttgggggaaggtttgtatgtttttgtttattgaggaatagagaggttacgttgagttatatgtaggtaattattattatttgtttatttaaagggatttagaaattagaagggaaagataagttgaatattttgaaaaggtgttttttattgataggaattgtggaaatttttatgtggaaaagtatgaaaagaaataagattaggtaagggtgtttagttagattattttttaaaaaaatagtaaaatatgtatttttaaattttaatagataaattgaaagaggttggttattatagagaattatgttagtaattcggaagagtaagcgcgaaaaataatttaaatagatataattatataggaataaaaattattcggtaaatataatatatttggaggatagatttaggaagattaacgtgtaagtaataaggtttaaaatagagaaaaagagacgaaatggaagagaagaattagaagggaaaaaagaagagttggaatagagaaaaaagatttgagtttgtttatgaaaagttttattaagtataattttgtaaatatattaaaaaatattggtttatttatttatttattttagacggagttttgttttgtcgtttaggttggagtgtagtggcgtgattttagtttattgtaatttttattttttaggtttaagtgatttttttgttttagtttttcgagtagttgggattataggtgcgtgttattatatttagttaatttgtgtgtgtgtgtgtatttttagtagagatggggttttataatgttggttaggttggtttcgaatttttgattttaggtgatttatttattttggatttttaaagtgttgggattataggtatgagttattgtattcggtttaaaattattggtttatatattttattttatttttattatttttttaaatttgagatggaattttattttgttatcgaggttggagtgtagtggcgtaatttcggtttattgtaatttttgttttttaggtttaagagattttttttttttagttttttaagtagttgggattataggcgagtgttattatgtttggttaatttttgtatttttagtagagatggggttttattattgttgattaggttagttttgaatttttaattttaggtgatttatttattttagttttttaaagtgttgggattagaggtatgatttattttgtttagttaggtttatatattttaaataggtgaattatatggtatgtaaattatagtttaatatagtttttaaatttttattaggtatattatgtaaataaaaatttttattttttggtcggatatggtggtttatatttgtgattttagtattttgggaggttgaggtaggtagattatttgaggttaggagtttgagattagtttggttaatatggtaaaattttgtttttattaaaaatataaaaattagttatgcgcggtggtgcgcgtttgtagttttagttatttggaaggttgaggtaggagaattatttgaatttgggaggtggacgttgtagtgagttgagattatgttattgtattttagtttgggtgatagagtgagattttgttttaaattttaaaaaattatttttaaaaataaataataaatgatttaaatgaatgggtattttgagttagaggaaggagaaaaggggggagtttttggtgagtaatttattttgtgattgatttatatagttgtgttgtgagtattttattatttttagtaattggggtgtgtaggtagagtttggaagtattattatttagttttcgttatggaatatatttatttttgtaatgtgataaagttttagtttattaagtatgcgtgatttaagtaaaagtttaggaagtggatagggttaaagggttgtttatttagatttgtgtttttgtattgtggatttagtataatgatttttacgtggtatttgtgtttttatattttgggcgtatataaagattttttgaagagtattatgtaggcgtgggttgtttgatgggaattattttttagatttttaattttcgtatgtgtttgtggtttagaattgatttgtttgagggtatttttgtggttagggttatatttttttgatttttttttgatgaatatttaatattttttttgtagtttttatattattattattatattttcgtagggtgtagaatattttagggtgttaaataaagttttttagtgaagggatattttaaaaattatttttaatttagggattatatatttagagtaggattttttgtttttttttgttttatataaatttttgtgaagggttacgtggagtgtaaggaattggtaattttggtatgtgttaaggtgttatttacgtagatatattgtagaatgaagtaataggagtaataaaaatttttttttttttttttttttttttttaataatttttttttttttatttattttttaaaaatgtattttttttgagggagtattttatgagattggagtaagagtagaattagtagaaagaatagaggaggtagtggtttatttaattaaggagaaaaattttatggtagttaatttattttatttgtttgtttgtttattttagaatatttaagatttgttaataatttgttgggataaagtaatgtgttatgaagtatatttttttgaattgtatattattttttgtaaggggaaagagttttttgtttattagttttttggtttaggtaataattgtgtatttggtatgattttaaggagaaagatgttgtaagttttaattgattaatgttatattttaagataaaagatatttagagaggttatacggtatgttagttaagagtatagattgtggagttcgaatttttggttttaaatttaattttattgtgattttttataaattttttaatttttttgggttttagtttttatatttgtaaatatgagagtgaaaatagtatttattttatggggttattgtgaaggtttagaatagttttgtatttcgtaagcgttttgtaagttgtgttatttttaaaatgttaggtaagtgggttaagcgaggtggtttatgtttgtaattttagtattttgggaggcggaggcgggtggattatttgaggttaggtttttgagattagtttgattaatatggtgaaattttatttttattaaaaatataaaaattagttggcgtggtggtaggtatttgtagttttagttacgtgggaagttgaggtaagagaatagtttgaatttgggaagtggaggttgtagtgagtcgagattgtattattgtattttagtttggtcgatagagcgagatttcgttttaaaaaaatgaaaaataaaaaatgttaggtaagttaatgatttatatttttttgaaaatatggaaagacgtattataagagaagtatttttgtttaatttattaaaaagttattgggggttataaattgaatatagagttttataaggtataggaaattttttagacgtttataaatatattttttgatgtagaggagtatgatagggtgattaataaaagttttttaagtaaaaaattattatagattatatgatattttagaaaagataaaattataaaggtagttaagagttaatggttgttaggggttacgagggtggggtgatgaataggtggagtatagaggatttttagggcgtgaaattattgtatatgatattataatggtggatgtttgttattgtatatttgttaaaatttatagaatatataagagtaaattttgacgttaacgaggtggggaggttgtgtttgcgtaggggtagggagtttatgggatttttgtatttattatttaattttgttgtgaatttaaaattgttttaagagataaggtttattaattagatatattgtgatatatgtatagtagtagaatatttatgttattggtatttaatatgatatatggagagagattagtagaataatatggggaaagtaaaatggaattataagttcgtagagtaggaggaattatttaaaaatttagattattgaggaagagtttgtttatatgttatttaaaaggataatggaagttaggtgtagtggtttacgtttgtaattttagtatttggggaggttgaggcgggaggattgtttgagtttaagagtttaatattagtttgagtaatatagtgagattttttatattttttaaagtaaaataaaatttaaaaaaaggataatgatgagtattgagatgttgttagtgtttagagtttattggaaatattttaaagagtagtaaaaatttttattattttaatgtttatatttataatatggtagaaattatattttttgtaataattaaatgtatgataaaaaatttagattaaatatagatagaggagggaaaatagttttttaaaattgtttttgaacgtatatataatagaaaatttgaagatgggtatttaagtatataggatatttttatataaatggtggttttagatagttgaagaagtttaagtagttgtaggagagatttttaaatttagggatagtggttgttattagagtggttcgtttgtgggaaaatgggttatagatatagattatattaggttatattttatagaaaatttttttttttttgttattttttgatgaattatatgttatatggaaggtattattgagattttttgtgatgaaaataattttatttgaattgggggtaaattaaaattagaagggaaagtagattttttgtttagttaggttgaagaaaatttaagtcggtatagggtgaggttgagagagatggtagcgagaatttggaatataggttttttttaaattaaatttttagtataggttatttaagggcgaattttaaatttatgttatgtttataaattgtgtattttacgtaattgtcgggtttttggaattttttattttgtgcgaaattaattttttattttttaaaataaatttaagttttaagtttataatttttgtttgtttttttttttttagttattagaatttttatgatttagattttttaaggaggtatttaaaaaaatgttttcggattagttagttttattcgagtaatttgtttttaatttattaattttttcgatatgttttttatgatgattcgtttatttgttttttaaattttatatagttgggtttttgtagttttgtggttttatatttcgtatattttttaatagtgatagttttagaatttttatgttagatgaagttgggaataggtagtttggttggaggaagatatttaggggttagatttaaagttttgtttggatatgataatttttttttataatggcgaagagtataggttttgtagttggattgatagtttaatttttgattttattatttattaattttgtgagtttggttaaattatttgatttttttatggtttagtttttttatttgtaaaatgaagataatggtagtattgtgttttagagtcgttggatgttaatgtaggattttagtgattagatggaacgagagggagtttaggagagattagtttgaagggtcgaagttttgtttttatattgttagtaggaggtataaatttttttttagaggacgtgtaggaaagaagtggaggggagagtttttgaaatggggggaaaatagttttgagaggggtattaaattttatatggttaagtatttatttaaaagagatttgaaatattgtttttttttttttttttttttttttttttgagacggagttttattttgttattcgggttggagtgtagtggtgcgattttggtttattataatttttgtttttcgggtttaagtaatttttttgttttagttttttaagtagttgggattataggtattcgttattacgtttagttaatttatttttatttttatttttattagagatggggttttattatgttgattaggttggttttaaatttttaattcgtttattttggttttttaaagtgttgggattataggcgtgagttattaaaattttttttttttttattgtttttaattttttttttaagtttattgaggtaaaatagataaaaattatatgtttttagcgtgtataatgtgttgatttgatgagtatatattgtgaaataattattattattaaattaatgaatatattattaatatatatttattattttttttttgtgtgtgttagtaaattttagatagataatataatattgttaattatagtttttatgtgattaaagttttagaatttattttttttataattgaaagtttgtatttttgattgttgtttttaatttttaaattgaggtttaaaatatatgtagtaaaatgtgtagagtggatatataagtgtttaagtcgttgaattttatttaattttttaatgtatttattttaaagaaatagagatagggttttgttatgttgtttagattgtttttgaatttttgggtttatataatttttttattttagttttttaaggtgttgggattataggtatgagttatcgtattcggttaattgttgaattttaatatatgtatatatttatttattcgttttttagattaagatgtgttatatttttattattttagaagttttttttgttttttttttattagtgttattttagaggtagttagtattttgattttaattattattagttgatttttttatgtatttgatttttatataattagaattatatagtatgttttttaaaagagatatttttaaaagaaaatgaaattttattattaatatttggtaagtttatattcgtatttttatttttaattttaggtttttttgttattggtgggaaagagagtttggaaattgagttgggtgagttatagtaagttaaattatatttttttttgtatatttgaattatacggggtaaattttaattaattgttagttgtgagtttagaaatagggacgtaggtgagttagggtttttgatttatgtttaagagttattgttaaagattgatttagggaaatgggtagtttcgtgttttatttttttttttatttattttcgtttgatattagaagtgagatttatttagtgtttattttttttatttttggagagtttatagggagtggagtgtattatttacgtagttatgtgttgttttgtagttgggaaggagtattttggagaaagtcgggcgtgtgttttgatgtttttattattttttaaatttttagttttttttagatagattgttattgatttttattatttatttgtttttttttttttttttttttttttttttttttataaaggttttttgttttgaaaatgaggtatatttagggaaaataggttttaggttagttttggtttaaagggtgggttttttttatttcgataagtttgatttttttattttgtttttttttttgtttttttttatgtgtgcgttttttggttttgtcgattttgttttttttttcgttttgatttttgtagggtatatttttttaaacggttttgtagaaagtatagcgtagaaatgtttttttttggggagggaggatttaaagttttggttttttttatttagtattagttataaatgttatagatacgtttgcgaggaaaaaagaagaaaaataagaagttaaattgtggagtaatttgggggttttttttaattatgttatttgtttataaggtttattttggtattggttggtttttgggtttttttgtgtaattttattttttattaaggtttagggggtttgttttttgtttttttgtttttttgatttattttttttttggaatttaggtatttaaatgataatttttatgtgtattatttagagatgagaagaggaaatattttttttgttttttggtttttgtggttgtttttttttggatttttgggatttagtaagtgatttagtagttaaggagggagaggggtatggaggttatataagttttgaaggagatggggaattttttgtttaggtatgattttttttttagaaataatgatgatttatttttttttttttttttttgtttatttttgtaaaagttagtattgattttaattttattgattatgattttgatgttgttttagaagtaaatttgtattagttttttttagttgtggttgtgagtatatgtggtggggcggtggggcggtgttggggaaatggaggggggtgagattttatttttttttgtattttggataaaagtttttttttttaatcggaaaattttagttttaatagtatttttaattttaaattaaaattaggattttagtttaaagttaagtaaaaattttttaatttttttttgttttttttttataggttatttgggtataggtgatatttggttatgtaagtgttttattggtgaattgtgagattttggtgtattcgttattaagtagtgtatatcgtatttattttatttgtagttttttatttttcgtgtttttttcgttttttttttttagtgtttaaagtttattgtattatttttatgcgtttgagtttttatagtttagtttttatttattagtgagaatatacgatgtttggttttttatttttgagtaattttatttagaataatagtttatagttttatttaggttattgtaaatgttattaatttatttttttttatggttgagtagtattttatcgtatatatatgttagtttttttatttatcgttgattgatgggtatttgggttttatgattttgtaattgtgaattgtgttgttataaatatgtgtgtgtaagtgttttttttgtataatgatttttttttttttgggtagatatttagtagtgggattattggattaaatggtagatttatttttagttttttaagaaatttttatattgttttttatagtgattgtattagtttatatttttattagtagtgtagaagtgttttttgattattgtatttacgttaatatttattgttttttgattttttgttttaattttttttcggatgttgtttgattttaaatttatgtataattttttgagaatttttttggtagaaataaatcggagttcggttattgaggggttggttttgatattggattagtaatggttgtgaaaggaaatagtttaggggagaagtgaattgggtttcgtgtgattttaatgggttgtttgagatagtattgtttattttagtttttgattttttatattaatatattttttttaattatgagatattaggttaattggtttatttattttattgtttttattgtaggatggttcgttaagaagtgggaggtgcggttgaaagagaaggtataggttggatgatgtggaggatttggagtgtttttttttttttttttagtatgtatttgttttttgtattttattttggattcgttttttcgttcgttttagtatttttttcggcgtttttttttttttttttttttttgtttttattttgaatgttttaattgttttttatttatttatgttttttagatttgttcgtcgtttgttttaattttgaattttagttttatttgtttgattttaaataagagtttttttattttagaagaaattgttatttatgtagttatttaataaatatttatagagttttttttttgggttaggtattgttgcgtgttaggttatggtgaggaatggagtgggaaatgttatggttttgatttttatggaatatttggtttattgtaaaatatagatttaaataatattttttaataaaagggagtaagtgtgtaagggttgaaaggttttttttttttttttattattagatttataaagtaattaatagtgttttttgtagttttattatagtggattagtaaggattaatttttttatttgaatgttgggcgtcgttttatttttttgtcgttttaggggttttgtttagtgtatttttttttttttttttattttattttattttttttgggttttttttattagtatttaaataagtttagttttgtatgtataagtattatttaaggagacgattaaaaatttgggtttttaggttttgatattttattaagtaagattttgatttagtaagtttggtgggatggcgtgggttttttagatagtgtgattttagaggtttttggattaaatattgaatgatgtttattttaacgttttcgtattattttttagttattatttttttttttatttttttttttatttttatttttttttttttttttggagatggagtgtggttttgtcgtttaggttagagtgtagtgttgtaatttcggtttattgtaatttttgttttttaggtttaagcgatttttttgttttagttttttgagtagttgggattataggcgtatatcgttacgtttagttaattttttgtattttagtagagacggggttttattgtgttgtttaggttggattcgaatttttgagtttagataatttatttattttggttttttaaagtgttgggattacgggtgtgagttatcgggtttggttttttatttttatttttgaaggatttttttatatttgttatgttattttttattttttatttatttgtttattttattttattgtattaggtaatggatgtaagtagttttgaaaaagaaatatttgtagttttataaggttttttataaaattttagtttttgatttttttgttttaattgttttttattttgagttttgttttttagggtttttgttggtatttacgtttatattgtatttatttatttatttagagataagattttattttgttatttaggcgggaatgtagagatattattatagtttattgtagtttggtattttcgggtttaagggatttttttattttagttttttaaagtattgggattataggcgtgagttattgtattcggttataaatttttttattattattatttttttgttggttgaggttttttgggtttttttttttgttttgggtatgatttattgttttttttttaatgaaaagaaagatttaggttagattattttttttatatatttattgttttatattttcgtttataattttttttaaatgattgtattaaatttttggtgttaaattagtatttagtgtttatattatgataattataaattttatttttagtaatatttataattgggttatataattgtattgtgatgatattataataagtataaatgatttttagtaatatttataattgggttatataattgtattgtgatgattattcgtttttgtaatttttgtttttttagatattaataatagttttatttttaaaatgtttatagttttttttatatatgtaattaatttattttaaaatttttattagaagtatttttgttttttttaaatatatgaggtaatttattagttttattttttttttttgagtaattttatttggaagtttttgtttaattagagtaattttatttagaagtttttgtttaattagtattggttgtttgttagattttttgttttgtaatttgtatttagtaatattttggaaattttttttttttttttgtaaatttttattttttttttggttttatttttttattttggagtattattttttttagaagttttttgagagagagagtttatggtgggaaattattttaaaattttatgtattgttagggtaatgttaagttgttgtaataaggagatttcgaaagtggttttgaaaaataagtttattttttttttttgtattagttttaaggtaagtattataggatggtgggagttttgttttatgtagttatttagggattttgggtgaatatggttttttcgtttttaatatatggtttttagtgttattattattttagtttaaggagagggaagaaaaatagtattttgtattattttatgatatagttagttaaagtgtagttataagaggagaggtttataggttttagagataggaggtatggtattgttatgcgggattatttgagaaagatattaaggtagttaggaggtagaagataggagtgaaggaaagatttatgtttttttttttattgggtttttgtgggaaaggtaaggaaaggtagggtgaatagtttaggattggttggtttgaataatttttgtgttttttgagttatatggttgattattatttagttgtttagtatttgattttggaatgattaaggtagataaatattgttttttggagtatatgggttagatagaggagttatggttttggaatggttagtttgtatattagtttatgtttttggttggattttttgttatttttaagaattggttagttttggaaggttttgtttttttttagttagaaaagtttgttaagatgttaaaatatgataatatatagaaattaaaaatatatatataagtagaaattaaggaataggtatttatttttaaagaaatgaagtggaaattaatatgtattttttttttttaggggtttttgattagggtttagatatgtagttttatttagttataagagaggttgataaatgtaatttagttatgtgtttaggaagaagagaaaaatgggtttagttgtttatagattttatatatttgaaaatgttttattttatttttatatttgatttatagtttagttggttatagaattttaggatggatatgattttttttaggattttaaaggcgttgatttattatttttagattttagattgtgaagtttgatatttagattattgattttttgtaaaagatttattttttttattttggaggattttagatttttaaaattacgtgttttaaaattttatgatatggtgttatagtatggatttttttattgtgttaggaatttgtatagtagaaagttgtattagttagttttgggaaattttattgtatttttttttttgataattgtttttcgtttattttttttgttttgtttttttgaaaaaattttataatttggatgtttgattttttgggttgatattttaatttttttatatttttttttttgttttttaattttgtcgttttattttttttttggggagatttttttagtttttaaagtttttaaatttttttagtgaattttgaggttttttttttttaaagagattttttttttttttataattatttttaagatggtattttttatttttttttttttttgtgggtgttatatttttttttatattgttgaggatatttgaagttggttttgttgtttgtattgttttagttttttttggttttgttttatagggatatttgttttggtttttatattttaagttagagattttttttaaatatttggtaattttagaatgttttttgtatttgagtgaggtattaatatgatgtttggaagttttgtgagtaggggtagggtttgttaattggtggatttagttttagggtaatttagtagagacgtggtagtttagattgggaagatttttaaaatgttagtatttagtgttggttaatttttttttataagaagaattttttagattttgtttagagtatattagtatagttgttgaagtgttggaagttgagtaagggaataggtaatgtgggttttatattttagggtgtaagtatttttttaattgtatagttttagtaaaattttttgagaggtgatagggtgttggtagttttcgtttagtttcggagttttttcggtttcgttatttattttggttgcgtttgaggggttttttagtttttcgttgtattgtgggagattttttttgggttggtcgaggtcggagttagtttttttagtttttagggaggtgtggagggagaggtacgggcgggaattcgggttgtttgcggtatttgcgggttagtattagttttaggtgggcgtggtttcggggggttttatattttgagtttcgggttggcgtggttagtatagttggttttaggtagtgaggaatttagtattcgggttagtagttgcggagggtgcgttaggttttttagtagtgttagcgggtgttgcgttttaattttcgtcggattttagttgtttttttgaggggtacggtttgggatttgtagttcgttatgtttgagttttttttacgtcgttatgggtttttgtgtagttagaattttttagacgagcgttgttttttgttttgcggtattcggttttatagattgtttaagggttgaggagtattggcgtacggcgtgggattgacgggtagttttatttgcggtttaggtgcgggatttattaggtgaggttagttgggtttttgagtgtagtggggatttggagaatttttatgtttagttaagggattgtaaatatattaattagtattttgtgtttagtttaaggtttgtaaatgtattaattagtattttgtgtttagttaatttggtggggattcggagaatttttatgtttagttaagggattgtaaatatattaattagtattttgtgtttagtttaaggtttgtaaatatattagtaagtattttgtgtttagttaatttggtggggatttggagaatttttatgtttagttaagggattgtaaatatattaattagtattttgtgtttcgtttaaggtttgtaaatatattaattagtattttgtgtatagtttaaggtttgtaaatgtattaattagtgttttgtggggatttggagaatttttgtgtttagtttagggattgtaaatatattaattagtattttgttaaaatagattaattagttttttgtaaaattaatcggcgttttgtaaaatggattaattagtaggatgtgggtgttattagataagggaataaaagtaggttgttttgagttagtagtggtaattcgtttgggtatttttttatagtgtggaaattttgtttttttattttttgtgataaatattgttgttgtttattttttgagtttatattgcgtttatgagttgtaatatttattgcgaaaatttgtagttttatttttgaggttagtgagattacgaatttattagaagaaacgtcgaatatatttgaatattagaaggaataaatttaggatatattatttgtaagaattgtgatatttacggcgagagtttacggttttattgttgaagttagattaagaatttattaattttggatatatttttatttttgtttttagtagtgtttgggattattgatttagagtttttttggttttagtatttttagagataaaattttaagttgttaaaaggaagagaggtgtatttatttaagtgtttgagtggaaggagtgatttggagttgagagatagtttttagttatattgtattttaattattttttttgtatttagttatatgttatatttaaatttttagaggaatttagttgtaattttcgaatttttttaggattttatagaattaataatttattagtagttgatttatttttatttttaatggaggtttgtatgttgaagttttttttgttgtgttggagagttattatttatttgtttattatttttaaaaaaataaaaatattttttttgttgttatttttttatcgtttgtttttgtggaggtatgtgttttgttatttttttattttttatttttttatgaaattcgtaagtttttatatatatttatttttttatttattttaattggggtttattttattatgtaaatttgtttttaataaattaaatttatttttatattgtttttgaatttaatggatatggtttaggttatattttatttgatttttttgtaaaaattaatttagttaattgttatatttttttagagtttttttatttttttgatttttttgatttattttttagagttttttttttgttttagtggatgtttttttttagttttatttatttgcgtttttttttttatttgagtgatgtagtggttagagtttggtttagcgttttattttttaatatatttttttagataagcgattttagttagttttatggttttaaatataatgtatatttaaatgatttttagttttacgttttttgatttgattttttttttaagaattaagtgtaggtttttaattgttaatagttttttggatatttaatgggtataaaaagtttaaagtttaatatttttaatttttattttatttttatttatttagataaatagaattaatttttaattttgcgtaagttttaaagttagaagttgtttttgattttttttcgtgttatttattatatgtagttttttaatattttttattggttttatttttttaattttaaaatatagtttgtatttatttattgaaaggtattttttttgttattattttagtttaagtaataattattgtttttaatttttttatttttgtttttttatatgttcgtttttatatagtattttttaaaaatataaattaattttgttttttatttttttttttttttttgaatgattaagttttagattattaggtgaggtagagtaaagtagatattagggttggataggaggggagatagtagtggtttagagaaggatataagaaattgaattgggtcgggtgcggtggtttacgtttgtaattttagtattttgggaggttgaggtgggtagattatttgaggttaggagttcgagggtagtttggttaatatggtaaaattttgtttttattagaaatataaaaattagttgggtgtggtagcgtatgtttgtatttttagttatttaggaggttgaggtaggagaattttttgaattcgggaggtggaagttgtaatgagtcgagatagtattattgtattttagtttgggtgatagagtaagaaattaaattggatgaagtggatttttttatagagtggtagtttggtatgttttgttagaattttgtgagggtgagagggagtatggggtggagggagtatgggttgaaaatgaatgaatagaatattagtgattttgtgagataatgttttgtttgtaatatgtattattgaagttttagaaaaaaagggaatcgaaaatatgtttaaagaaatagtagttgaaaaaattaaatttgatgaaaattataaatttatagattttaagaatttaataaatattaagtaaaataaattttaaaaaattatattaaagtataacgtaattaaataattaaaaattagtgataaaagggaaattttagaatgagttagaaaagatatattgtatagagaggagtaaagataagtataatagattttttgtgaaaaattatgataattagaagataaagaagtaatattattaaaatattgaaagaaaaaaatattttattaatttagaattatacggagtaagaatatttttaatatgaagatgaaatgaaggtttttttagataagtaaaaattggaagattttgttttttggaaattgattttttttttttttttttttgatacggagtttcgtttttgttgttttaggttggagcgtaatggtacgattttggtttattgtaatttttgtttttcggtgagaggtgatagcgtgttggtagtttttagagttttcgtttgtttttagtattttttttgtttgggtttttattttggcggtatttgaggagttttttagtttatcgttgtattgtgggagtttttttttgggttggtcgaggttagagtcggtttttttagtttgtagggaggtgtggagggagaggtgcgagcgggaatcgggattgtgcgcggcgtttgcgggttagttgtagttttaggtaggcgtgggtttggcggtttcgtattcgaagtagttagcgggttttgtaggtttcgggtagtgaggggtttagtattcgggttagtggttgcggagggtgtattaggttttttagtagtgtcggtttattggcgttgtattggattttttattgggttttagttgtttttttatggggtagggttggggatttgtagttcgttatgtttgagttttttattttttttatgggtttttgtgcggtcggagttttttcgatgagcgtcgttttttgttttagggcgtttagttttatcgatcgtttacgggttgaggattgtgagcgtatggcgtaggattggtaggtagttttatttgcggtttcggggcgggatttattgggtgaagttagttgggtttttgagtttggtgaggacgtggagagtttttatgtttagtttagggattgtaaatatattaattagtattttgtgtgtagtttaggatttgtgagtatattaatggatattttgtatttagttgttttggtagggttttggagaatttttatgtttagtttagggattgtaaatatattaatcggtattttgtatttagtttaaggtttgtaaatatattaattagtattttgtgtttagtttagggtttgtgagtgtattaattaatattttgtatttagttgttttcgtggggttttggagaatttttatgtttagtttagggattgtaaatatattaatcggtattttgtatttagtttaaggtttgtaaatatattaattagtattttgtgtttagtttaaagtttgtgagtgtattaatcgatattttgtatttagttgttttggaggggttttggaggatttttgtgtttatattttgtatttaattaatttgatggggacgtggagaatttttgtatgtagtttagggattgtaaacgtattaattagtattttgttaaaatagattattcggttttattaattagtaggatgtgggtggggttagataagagaataaaagtaggttgttcgagttagtagtggtaatttgtttgggtcgttttttatattgtggaaattttgtttttttgttttttgtaatagattttgttattgtttattttttgggtttatattgtttttatgatttgtaatatttatcgtaaaggtttgtagttttatttttgaagttagcgagtttacgagtttattgagaggaaggaataattttatacgtatgggtttaagagttgttaatatttattgtgaaggtttgtagttttatttatgagttagcgagagtataaatttattagaaggaagaaatttcgaatatatttgaatattagaaggagtaaattttagatatgttattttaagagttgtaatatttattgtgagggtttgtggttttatttttgaagttagtgagattaagaatttattaattttagatatattgggtttaagcgatttttttgttttagtttttcgagtagttgggattataggtatgtaattagttatattatgtttggttaattttgtatttttagtatagatgggggtttttaattttggttaggttggtatcgaatttttggtgatttgtttgtttttgttttttaaaatgttgggattataggcgtgaatcgataggtaagattgatatttttttttaaatgtaaaagttttttaggaagaaaaaatttagatttatgtaaaaaagaatgaagtgtgttggaaatgataaatatatgggtaaaaataaaattttttttatttaaattttaaaagataatatatttgagtaataatgaattatgaggtttatatgtagatataaaatgtatgataatagtggtataagggatagaaaaaggaaatggaagtgtattgtgttgagatttttatgtttttataggaagaggaatgagtttattgggaggtagatagtgataaaggtgtatatcgtaaattttagagtaaaggtatataaataagaatgatatttaataagttaatggtggaaataaaatggggttaaaaatgatttaggttatggtgtagcggtttatgtttgtaattttagttttttgggaggttgaggtaggtggattatttgaggttaggagttagagattagtttgggtaacgtggtgaaattttgtttttattaaaaatataaaaattagttgggcgtggtggcgtatgtttgtggttttagttatttaggaggtcgaggtaggagaattatttgaatttgggaagtggaattggtagtgagttgagattttattattgtattttagtttgagtgatagattaagacgtttaaaaaataaaataaaataaaaaataaaatattgggttaattaaaaaaaaaaaaggcgaaaaatggaggaaaaggtaagaagattagacgagaaaaatagaaaataaatatgaagattattaaatttagggttagttatagtggtttatatttgtaattttagtattttttggggttgaggtaggaagattatttgagtttaggagttcgagataagtttaggtaatatagggagattttatttttataagaaataaaaattaaaaagtaattagttaggtattatgattcgtgtttgtgattttagatagttcggaggttgaggtaggaggattttttgagtttagaaagttaaggttgtagttagtcgtgattgtgttattgtattatagtttgagtgatagagtaagattttgtttttaaaaaagaattagatttaacgtatttataattatattaaatgtatatggtttagatattataattaaaaggtagagattgatatattggttaaaaaagaaagttttaaataaataatatttaattaagaaatatattttaattaattataattataaatagggtaaataataggataaaaataagaggaagaaagatacggttatattgtatgttagttatgttaatattaatttagaaaaaaattgagtgattattttaaaattagataaaataggtttaagaagaggtatattattagggataaagagagatattttataattataattataatataatatttattaattataaagggagaaaaattagtttggatatatttttttaattaagtaatttaagagaatattattaatgatgggatatattgatattatttgttatttgatagtatgtaaagagaagaatatagtattattttagtggtttttttggtaaagattaataatatgagtttaattatgatgaaatattataaaaatttagtttaaggaaaattttataaaataattgatttgtaatttttaaaggttaaaagttatgaagattaaaggaagattgaagaattgtattagattgaagaagattaaagagatagaataacgaaaaataatatacgattttgaattgaattggtttattattaaagatattattagaataattaataaaatttgaaagggatttaaggattaggtggtagtaatatatttatgtgaattttttgattttgatggttgtattatggttgcgtatgagaatatataaagtattgaaggataatgagatagatttagggaaaagggttttttgtgttatatttgttataaaagaatttgtgatttttttttttaaaataaaaataaagagaaattaattagagtatgttattttagtgggtttttattgtatttgagatgaaatttaatttttttattatggtattttgttaaattttgagtatatttttgttagtaaaagaaatgtgggtttatgtttttgtaaagaagagtttagaatataaagaatgtaaatatatttttgggttatgtgttgttaaaaaggtaggggttttgttttagagattatggttagaaaaggtttttttatcgtttcgtttttttttttagtaattatattttagttattttggttttttatttatttatgaattatatcgagtttattaataatttagggtatttgtatttatgttattaatttgtgatgttttttttttggttttttaaattgttgtttttttttttttttttttttttaagatggagttttgtttttgttggttaggttggagtgtagtggtgtaattttggtttattgtaattttcgtttttcggtttaagtgatttttttgttttagttttttgaatagttgggattataggtatgcgttattatgtttggttaattttgtatttttagtagagatggggtttttttatattggttaggttggttttgaattttcggttttaggtgattcgtttgggattataggtttgagttattgcgtttagtttaaatggttgtttttttattttttagattttagtttatatgttagttttttagagagattttttttgattttagtatttaaagtagtattattgttttttttaatagtatttaagttaatgtgtatttatattttatgttgtagtttttttttttattaaattataagtttatattttttttgttgataggagtatgtttagagtttagtaaaatattaggtatatgttaagtttttaataattgaataaataaatgaataagaagtattgagtatatgtgaaagtaatattatattaaatttgtaaatttatttttaatttatttttattattttatttgttttttattttaggttttgagaatattatagtttttataaaaggtttcgatattattatagtttttattataggttttgagattattatggtttttattatggtttttattacggttttaattataggttttaagattattatagattttattataggttttgagataattttagtttttattatggtttttattgtagtttttattataggttttgagattaatacggtttttattatagatttagggattattatagtttttattaggatttttattataggttttgatataattataggttttattgtaggttttgaaattatcgtggtttttattatagtttttgggattataataatttttattatagtttttattatagtttttgagattattatggtttttagtataatttttattgtaggttttgagaaaacgatggttttttttataatttttgagattattatggtttttattataggttttgagattgttatagtttttattataggttttgagattattattatttttattgtaagttttgaggttattaaagtttttattataggttttgaaattattatagtatttattgtaggttttgagattattattatttttatttttatggtaggttttgaggttattataattttaattgtagattttaaggtgattacggtatttagtatgagttttgagattattgtggttttcgttgtaggttttaatattattatagtttttattataggttttgagattattataattttgattaaagtttttgagattattatagtttttatagtaggttttgagattattatttttttttttataggtttttagattattatagtttttattttaggttttgagattattattatttttacggtaggattcgagaatattatagtttttagtgtaggttttgggattattatagtttttatggtaggttttgagattatcgtttttattgtaggttttgagattattatagtttttattataggtattgagattattatggtttttgttatgggtttagagattattataaattttattataagttttgagattatcgttatttttattgtaggttttgagattattatagtttttatcgtgggttttgagattattatagtttatattgtagattttgagattattgtagtttttattataggttttgagatgattatagtttttattgtaggttcggaaattattatattttttattgtaggtttagagattattatagtttttattgtaggttttgagattattatagtttttattataggttttgagattataatagtttttattgtatattttgagacgattgtagtttttattatgggttttgagattattaaagttttaattgtaggttttgagattatagtttttattgtaggttttgagattattgtagtttttattgaagattttgaaattaatatagtatttattgaagattttaagattattatagtttttattatagggtttgagataatcgtagtttttattataggttttgagtttattatggtatttattatgggttttgagattattatggtttttattataggttttgagattattaaggtttttattgtaagttttgaggtgattatagtttttgttgtaggttttgagataattagagtttttatcgtaggttttgagattattatagtttttattataggttttgagattattatagtttttattatgggttttgagattagtatagattttattataggttttgagattattatagtttttattgaaggttttgagattattatagtttttattgaaggttttgaggttattatagtttttattataggttttgagattattatagtttttattatagatttagagattattattatttgtattgaaggttttgagatgattgtagtttttattatagtttttgagattattatagtttttattgaaggttttgagattataatagtttttattttagattttgagattattatagtttttattgaaggttttgagattattatagttattatcgtaggttttgagattaaaatagtttatattataggttttgagattattatagtttttaatataggtttggagattattatagtttttattataggttttgatattattatagtttttattgaaggttttgagattattgtagtttttgttataggttttgagatgattatagtttttattgaaggttttgagaatattatagtttttattataggttttgagattattatagtttttattataggtttggagattattattatttttattgaaggttttgagatgattatagtttttattataggtgttgagattattatagattttattgaaggttttgggattattgtagtttttattgtaggttttgagattattatagtttttattgtagattttgagaatattatagtatttattgtagattttgagattattttagtttttattataggttttgagattattatagtttttattataagttttgagattattatagtttttattgaaggttttgagattattatagtttttattatagattttgagattattatggtttttattataggttttgagaggattattatttttattgaaggttttgagattattatagtatttgttataggttttgagattatagtttttattgaaggttttgggattattatagtttttattataggttttgagattattaaagtttttattataggtttagagattattattatttttattgaaggttttgagattattatagtttttattataggttttgagattattatagtttttattgaaggtttcgagattattatagtttttattgaaggtttcgagattattttagtttttattataggttttgagattattatagtttttattataagttttgagattattatggtatttattatgggttttgagattattatggtttttattataggttttgagattattaaggtttttattgtaagttttaaaatgattatagtttttattgaaaattttgagattattatagtttttattatagtttttgagattattatagtttttattgtaggttttgagattattttagtttttatagtaggttttgagattattattattatttttattgaaggttttgagattattatagtttttattgaaggttttgagattattatagtttttattgaaagttttgagattattatagttattattataggttttgagattattatagtttttattgaaggttttgagattattattatttttattgaaggttttgagattattatagtttttattgaaggttttgagattattatagtttttattataggttttgagattattatagtttttattgaaggttttgagattattatagtttttattgaaggttttgagtttattatagtttttattataggttttgagattattatagtttttgttgaaggttttgagattattatagttattattatgggttttgagattattacggtttttattgtaggtttagagattattatagtttttattgtaggttttgagattattatagtttttattgaaggttttgagattattatagttttttttataggttttgagattattatagtttttattataggtattgagattattattatttttattgaaggtttagagattattatagttattattgtaggttttgagattatagtagtttatattataggttttgagattattattatttttattgaaggttttgagataattatagtttttattacgggttttgagattattatagtttttatcgtagatttggagattattatagtttttattttaggttttgggattattatagtttttatcgtaggttttgagattataatagtttatattataggttttaagattattatcgtttttattgaaggttttgaggttattatagtttttattattagttttgagattattatagtttttattataggttttgagatgattatagtttttattatagtttttgagattattatagtttttattataggttttgaggttattatattttttgttgtaggttttgaggttattattatttttattgaaggttttgagattattatagtttttattgtaggttttgagattattatagtttttattgtaggttttgagattattatagtttttattttaggttttgagattaatatagtttgtattataggttttgagatttttatattttttagtgtaggttttgagattaatattgtttttattataggttttgagagtattatagtttttattgtaagtttggagtttattgtaattttttttataggttttgagattattatagtttttattatagtttttggggttattgtagtttttattattgttttttttattacgtttgtatttattaaggttattgacgtttttatttagtttattattaatatatttatgttaggtattaatttttatgttttttttgagtttatatattttaattttagtggtaattattagttgtttatttgtttttattatttttgttttggtttaagttaagttagtatatagttagatataatttttttttttaggttgggcgcggtggtttatgtttgtaattttagtatattggaaggttgaggcgagcgaattacgagattaggagattgagattattttggttaatacggtgaaatttagtttttattaaaaatataaaaaattagttgggcgtggtggcgggtatttgtagttttagttattcggaaggttgaggtaggagaatgatgtgaattcgggaggtggagtttgtagtgagtagagatcgcgttattgtattttagtttgggcgatagagcgagatttcgttttaaaaaaaaaaaaaaaaatgtttttttttggaattttaattgtttttattttggttttatttttttttttttaagtgtttattatttttattgtaattagaattataatatagtaaattataagtgtattatatttgttatatttttttttagtaagttcgttttaattttattggtttattatagttttgtgaaatgtttttatttcggtgttaagtagattatttttatttaattaattatttgtgatattgttattttttattaatgtattgattttagattagaggttggtagattatattttatgggttaagttttatttgttatttggttttgtaaagttttattggaatatagttatgtttatttatttatggtttgtttttagttgtttttttgttttttcgtgtatttgtaatagagatagtttggtttaaaagtttaaattatttgttgtttggatttttatagaaaaaatttggtaatttttgttttagtttgagattaaataattttgtttattttttggtatttgttattagtaagtcggttatatttgattttatttttttggttttaagtatatttatttttatttttatgattggtgttgtttgtgattttattttaattatttttgatttaggtatatttatcgttatttaagtcgttattatcgtttttgttgtgttgattcgtgtttatatttgtttgagtttatttttttttatttttgtgagtagttttttttatttgggttaggtttttttatatttgtttaagtatatttattttatttttgttgattattatagtgtggtagatgatgttatttttgttttagttacggttattggtatgtttatgagtgaatttaattttattatttttttttttagttttttttttatatttagtgattatagttataaaagaagtagggtttgtcgttttgtatattagtttatttatttatttgatttgttttgatttatttatttttaattttttttataagttattgggatgtaggtggtatttggttatatgaataagttttttagtggtgatttgtgagattttggtgtatttattattttagtagtatatattgtattatatttgaagttttttatttttcgtttttttttattttttttttaaagtttttaaagtttattgtattatttttatgttttcgtatttttatagtttagtttttatatattagtgagaatatacgatgttcggttttttatttttgagttattttatttagaagaatagtttaaaattttatttaggttattgtaaatgttgttaatttatttatttttattagtttatttttttttatttgggtggttatttttgaagttaaatagattttttatttttgaatttatcgcgataacgtttttttaaatttttgttttttttattattaattttattaggtgatatattttatttttttttttgtatgatatttatttgtattttggggatatggttatagtagaatcgttttttattatttttttttttttattatattttttttgagttatttttattataggtttgttagatttatttttttttggtttaagtatttttatttttttttaattatttttgttataaatgtattattttgtgtgatttgttttataggtattagaattattggaattagatttattgtttttagttttgttattatggtttttggaatggattttacggtttttgttgttagttatattgtgttaggaatagttttaaatatttttggtttgggtatatttattatgggagtattatttattattttagtttacggcgttaggattattataggatttattcgtgagttaattagtagtattttttaggaaataggttcggtgtttatgggtataaatatagttagtatgagttatatatttataaacgtgattaaattaagtggatatttatagttttgggttattatttttatttttttggttgtagttgtggttgttgttggattgttagtaggattgagtttttgtttggtgagtatttagggtgggtttataggggagtttggtaagaaggtaggggggaattatgttagtagtgttttggaaaaatttagaatgagaaaggggagtaagttggtgcgtttagaaggaaagaattatttagtttgatataaggattagagagaatgtttaagttagagaaagtgagaagtaaagtagaaaaagaggagggaaaagatggagttggggttaaagtgaagggaaatattgatagaataagggaaatattgagagagaataaggaggatataaatataaagaaagtaagaagtagttgggcgtagtggtttatttttgtaattttagtattttggaaggttaaggagggcggattatttgagtttaggtatttgagattagtttggttaatatggtgaaatttgtttttattaaaaatataaaaattagtcgagagtggtagtatggatttgtagttttagttattttggaggttgaggtacgagaattgtttgaatttgggagatggaggttgtagtgagtagagatcgtgttattgtattttagtttgagtgatagagtaagattttgtttcgaaaggaaggaagaaagaaaagaaaggtaggaaggaaggaaggagagagagagagaaaaagagaaagaatgaggaagaaaggaagaaagtaagaaagagaaagaaaggaagaaagaaagaaagaaattgagagagaaagagaaagaaaaaagaaagaaggaaagaaagagagagagaaatagagaaaagaaagaagtataaaaatgtttagttatttaaaatgcgggttttcgattgttttatgtatgataaatttttggtttttatagtaattttttgtgtggtttgtgattgttattttttgattttttattttatttttgttttttggttttgattgttttttgaatatatattttttttatatcgattttatatttattgatgttttttttgtttttttgtgattttgcgggtaagttattatttgaggagtgaagtagagtataaattagtggtgtgttggagttggtttattttggtttataagagattgtgtagttttttttaattttgagttgagtgatgtgatattggtagtttaaaatatgttgggttggaaatatttatattatagtaattgttaaatattataaattagtatttttttttcggagagtttgttattaagtgttggatagtatattattggtaaaaatggataaaatgaaaaatacggaagttataaaagatttggataatatagttaatttgttgaggttttttgttttagaatttttagttttttttcgtatgtggattatataataaatattagtatttaagaattattttttaaattattttattattttatttgtaagattaagagagaataacgaaagtgaatattgagtttttattgtttgttaggtttaaggttgaatgtttaaaatgtataatgttatttaatttggtttataatttcgtggttatattatatttattttataagtaagggatttggagttttatgattttagttatttgttttagtatatgtagtgagtggtagatataagattttaatttaggttagttggattttggagtttatgtttataattttaaggttttgtgtagatagttttttagagtttttaattttacgtatttgttttgagtttttttagttgattaataaagagaaagattgtttgtaaagtgagtttttgtgttttttatataggggtatggatttatttttgttttggaagtttaaaaatatataattttatgatttgtagagttagggtttgagtacgtatataaagatgatatgttaataaggtaataaggaagtttattttgttagacggagaaagagtaaaagaataaggaaaaagagagatagagatagagattatagtaaggatggtggtaaagagaagagaatatgggtagtttggaaaagtgaaaatttgatattggtgaaataggtatgtatggtgattagggagaggagatttaatttttatttattaatgtatttattttttttttttagagaaatttttttttttttttgagatattgtggtatttattatttttatggttatagttatagttttggtttggatttgaatttgggtttgggttttgggatattttatagtttgggaaatgtattggtttatggaggagaatttgaaatgggatatggaggaatatacggttttggatatggagtgggttatggattgagttatatttatggagatggttacggagtgaattatggcgggtattatggatatggaggaggttattgaggatattatggagtggattatagagggagttattaaggaggttacggtaggataagatggttgtggttatagattgggtattaaaatatattatgggtgggagggggttatggaggagaaaaaaataatgattatgaaataattaaaatggagtataggaagttttttaggatgtgatttatggagatggatatggattaggttaagaaaagaattagtaaaaggattttagagattttgattggtttggaggggattttaagttaaagtttttgtgagttttttttgagttttagtttttgttgtggggagttacgataattatttttaggatatttttttttttatttttcgttatattagggttaacgttttttatttttgtgtttttttatggtgttataaatattattaagatatgtttaagaaataaaagtatataatgaatgtattattagggttatatacgtattcgtttttttgtttgtttttttaggttttgttttttttttttttttttgagtgtttattatgtattaattattattttaggagtttttaaatacgttattatttggttgggtgtggtggtttacgtttgtaattttagtattttgggaggttaatgcgggtggattatttgaggttaggagttcgagattagtttggttaatatggtgaaatttcgtttttattaaataaatataaaaattagttaggcgtggtggcgagtgtttataattttagttattcgggatgttgaggtaggagaatcggttgaatttgggaggtggaggttgtagtgaggcgagattgtgttattgtattttagtttgggcgatagaggaagattttgttttaaaaaaaaaaaaaaggttattatttaatttttagaaaatattttggtgattttgaggtaggtaaagatatttagatatttaagtaagatataaaaagtattagttattaaaagaaagtgtgatgatttggattttattaaagtttagtattagtatatatttttaagaggtatatttttaattataaaaggaaagttaaagatgggagaagatattgtaatatatatagttaataaacgatttatatttagaatgtagaaagagttataataagaaaaagatgatgtaattttaaattgggtaaaatatttgataaatagttagtaaaagaggatattaaaatagtcggtgaatatttgaaaaggtatttaatattattgtttattagaagtggaatgtaaaatcgtaatgagatattattatatatatatattgtaatgattagtatttgaaagattgttagtattaagtattggaaaggatattgaataattggaatttttatatattgttagtgggagtgtaaattgatataattattttgggaaaatgtttggtaatgttaaaattaaatatatattttatgattcggtatttttatttttgagagtaaatatttagtagaaatgaatatttgtgtttattaaaagatatgtattatgttagttttatttatattattgtagggtggaaatttaattttaaagtttattaatattagaataggtaagtaaattgtgatatatttatgtagtggaatgttatttagtagtgaaaaaaaaaatttatgaaattatataataatattaatgaattttatagttagtgttgagtaaaagaagttaaaataaaagtgtatttattgtataattttatttatatgtagtttaaggttatgtgatattaatttgttgtaataaaggttagagttgaggatgttttgggggaaaaggttgatcgggagaaggtatgagaaagtttttttgtaggggtagataggggaagttgagaatgttttgtgtatgatttgggtggtgattataagggtgtatagatatgtaaaattttattaaaatgtgtatatgagatttgtgtattttatggtatgtaagttatgttttaatttgaaaaatgaaaaagatattttgaggttatttttttagtatattatgatttttttggttagagaatgtggttggagatatatgacgataaatgaggtatttggtaagtttaaagatagtggtgttgtaggaagtattgtgtgtaagggaggtaagtagttatttttaatgaggataaattatttttttttttaggttgaaataggtttgatataattaatttgttattttttttggagaatggtgttatataacggggttaatattgatttttgttgttagtagttgaggtatttagttatggattatttgtttagtttggttttggtgaggggaaggttagtttattgagttttgtatacgttttatttttgttagtttgtttgttttgtttatgtttttgttgagcgagtattagagtagttggaaaaagagattggttgacgtttgtagaatggatcgtttggttaattttattatggaagattttttttgtagtgaacgtttattggtgaatagttatatgggatgtatatatttttattatttgtgttttttttaagagattcgtttattttttttttttttagatttttttgttattaatttattatgtttttttttattttgagttatttagttaaattgttagttattgtttattgattagggttaattgtaattggttatttttttgtttaggtaaagtaaataaagtagatgtattttttataattcggattattgggagaattttttttttttattgttttgtagggttgtcgtgagtggggtggtaatgttgtagtagtttgttttttgtggtgttagaatagtatgtagaattatttatatattagaggaaattaaatttttttttttttagttaattagatataggaaattttttatgtgattgtgattatggagagagaggttaggaatgtagttggagatgttattggagttatagttgtttatttatgttttttatttgtgttttgaggaattaatttagttaaattcgtaggtattatttttatttaaggaggtgagtattgttaagtatgtttagtttagtgtggtggtgtagataatatttagtttataaagggtagtttatgttttatgaattttcgtatgttgaggatttaagattaagttagatgttaggatgtggaagagggtttgtttttgttttaaaattttggggatttgtgtcgtggtttttttattagttatttagtgtttttatatagttttttgatgtattatagatattttaggtaatattggatttagttagtaatgttttaagtagttttatggttttgttttggtttttatttgaaagtggggaaatatgcgtagacggagtttagagatgaattttgagtaagatgttatttatgtttttttttttttgagatggagttttgttttgtcgtttaggttggaatagtggtacgattttggtttattgtaattttcgtttttcgtttttcgggtttaagcgatttttttgttttaatttttcgagtaggtggaattataggcgtttgttattatgtttggttaattttcgtatttttagtagagttaggtttttattttgttggttaggttggttttaaatttttgattttaagtaatttatttgttttggttttataaagtgttaggattgtcggtatgaattattgtgttcggttacgttatttatgttttaagttttataagttttattttgatttgtagatcgtaatgatgttttgtatgttattttaaaggtttgggtgtttttatttttttattgtattgttacgatgataaatggttgagattttttttgaaagttaggaggaagattcgcggtatattttggtggtggtggtggattttgttgttttttttttatttttaggtttgtgaataggttcgggtttgggaattaggtgagagtttgtggtaatttaagttagttttttgtttaattatttggatatttttatttatatagattaagtaagattttagtggttaattgattaatgattaattagttatagttaaagagttttgattatagttttggtcgtgatgtttatatcgataattatgtttgttttgtttttggagggaaagttttattatttatttattgttttttgaagattttattatgtttattgaaattaggaagtttattttaatggttagattatttattattgtatttagtaaagagttgttatagagttttttaacgatgttggtttttttttttttaatgttttgatgaagatagttttaatggaattttttgggaggacgtaatgaaagagtgagtgagtaagttgtatatattaaatttattttaatataattttttttttaagttttttgatttttttttttcgtttatattaatgaaatattgggattttaattttatttagtgtaggttattattaagtttatattttaagtaatcgagagaattattagtgtaatttatatttatttgagttaatgttttgaatttagaatatgtgataagtttatttatgtatttgttttttattagtgataatttattataaatgtagtagtttaaattaatatttatttattagattatagttttatgaggcgggtttggggttagtatgattgatttttttgtttagttttataggttaaaatgaaggtgttagttgagttgtatttttatttggaggttggtattttttttaagtttacgtggttgtggtagagtttagttttttgtgtttagagttgaggtttttgtttttttgtttattgttatttatggttgtttttagtttttagatttgatttaacgtatggagttggaggttacgaggggtattgtaatagggtttgtggtaggtagaataatagttttttaaaaatatttacgttttaatttttagaatttggaaatatgttattttatatggtaaaagggattttgtatgtatgatcgtattaaggattttgtaatggggagattattttggattatttgtatgggtttaatgtgattataaaggtttttataagagggagatgagaggtcgggcgtagtgatttatatttgtaattttagtatttagggaggttgaggagggtagattacgaggttaggagttcgagattagtttggttaagatgatgaaattttgtttttattaaaaatataaaatgtagtcgggtgtagtggtgggtgtttgtaattttagttttttagggggttgaggtaggagaatggtttgaatttaggaggtggaggttgtagtgagttaagattgtattattgtattttagtttgggtaatagggtaagatttaattttaaaaaaaaaaaaaaaaagagggagataggagttagagttagagagatttgaagatgttgcgatgtaagttttgaagatggaagaaggggttataaattaaggagtgttggaagtttttagcggtggaaaaggtgagtaaatagatttttttttagagtttttagaaggattatagattagttgatattttgattttagtttagtaaaatttattttaaattttcgatttttagaattgtaagataatatatttgtgttatttttagtttgaatttgtggtaatttgttacgtagtaataagaaattaatatagggtttgaggaaaatttgtgtttttttgttaagggagtgttgtgagggcgttattatagggtttttaggtaagagaaagtgatttttttatagaggggaggaggggttatttttgttggtaaggaaagttttgcgggatttggaggtttaaagttttttagatttattaaaatttatttaggtgtttttattttaattttgggttttcgttaataaatattttaaatgttatatacgagattggtaaagatataaatgtaagttgaatataattttttaatttgtagaattaaattgtgggtttggtttttttatatatagtttttgtggttttgagagataagtatgttttttagaatatttagagaaagttttgtgttcgttggtaatgttttgattgaggatgtagtagaggggttattttttttttgtaattttttagtgtagttatttatagtttcggtagttaatatttttagttttacgatttgttatagcgattatttgggttttcggtttttttttttaataattgttttattttaggtattattataggtgataatttaagttattttttttattttttgttgtgtaatataaagattttattttatattagtatgaggtcgtttttgtttttaagtttaatgggttagggaattaattttagattgttatttttgaacgttaattttttgaaattttttgttatattaaatattgtaatagttagagtttatttatgaaaatagaaattattttggatattttaagtataaaaggatttagtataagaagtagatgtttataaaattattcgaaaaggtggtgtgtcgtttattgttttttattttatatatagtgatttacgttggttatacgtagttagttttggcgggtgtatttgtattacgagaagtgagttgttaaatatttattagtatatacgttgtaggggatttaaggagagtgatggtattggaaagaggaatgtttttgtttttaattttttttgatagaggcgttttttttttgtttttgaagaatttatagaagtttttttatcggggagttttagttaggtttttttattagtgttgtgtgttagataagttagatgattaaggaagtatttatattttggatattgttagtttgtttggggattgagagtttatagtttaagtttgttttaattttggttgaggttaatagagagagtttaaagataattgaaggagcggtagaaaataaatatgggaacggggtaattggtttttagtttttttattcgtaggttatgaaaaaaatttggggttagattttatgagagtttttttgttttttgttttgtttgtttgtttgtttgtttgtttgagattgagtttcgttttgttatttaggttggagtgtagtggcgcgatttcggtttattataagtttcgttttttaggtttacgttatttttttgttttagtttttcgagtagttgggattataggcgttcgttattacgttttgttaattgttttgtatttttcgtagagatagggttttattgtgttagttaggatggtttcgattttttgattttgtgatttattcgttttagttttttaaagtgttgggattataggcgcgagttatcgtgttcggtttgttttttgtttttttgagatagggttttgttttgttgtttaggtttttgaattattttattttttatttttttttaggttttttttaatgggattaagttattttttatttttatttattttttggttgttgtatttttttttttaagtttggggattttgttattgtttatagttggaagaataatagtttatatgtttaggttttgtttagtttagatgatgttttaaaggttttttttttttttttttttttttttttttttttttgagatggagttttattttgttgtttaggttggagtgtaatggcgtggttttagtttattgtaatttttgttttttgggtttaagcgattttttcgttttagttttttaagtaattgggattataggtatgtgttattatattaagttaatttttgtatttttagtagtgatggcgttttattatgttggttaggttggtttcgaattattgatttcgtaatttgtttattttggttttttaaagttttgggattataggtatgagttattgtattcgttttaaaggttttttttgaaagagaaaaagaagaggtggtattttgtgaaggaatattaaggattagatatttagttttttttgtagtttaggtttttttagcggtgtttttttttagattgaggatttattttttggagtttcgaatttttagtagtttagtttttagatttttattttgagattttatttttaagatttttattttttgttttttttttttaaggtttaattttatcgggattaagggaggagtttttttttttagttttatataggtagattattttaaaagaaagagaaagtaatttttttttgtatgttggttgttttatttttttttatttttaggaaatggtgagtgattttgtttaaaagagaataattttggagtttgagtagagtttggggaaagtgttgataatttttgggatatatattttgtttttgttgtttttattttttttaaggtaggagggatgattattttgtttttttttttttaatgtaatttagtatttgtttttcgttttgtttttagtggtaatttttttgtttagaagatggatttatttattttataatatattatttttagatataggcgtattagagttggaagagaatttgaattagtgtttgattattcgtaataggtagggatttatttttagcgtttttgatagtagttatttagtttttaattaaatattttatgagatattgttgttttatatttacgtagatttaattttttttagaatttgttttagtatggttttgatttttgtgttttatgtttttgattaatataaaattagtttattttttttttataggttagttttttattttaattttttatttagttttttttttggttttgattttaatttaaggtatcgatatatagttttgggattttttttttaaatttaaattggtaatttttatgttagtttagataatattaaggtaagaatatatgtggagggtgaagggtagtatttatatttagggagagaatagggttatcgatgaggagagggtttatagggatttgggaggttaagggtttggttgttaatgggatggaaaattagaatagggtagaaaataggtatgatagggaaagaagtttagttttattttaattttaattgatttaataagaaagttgagttatttttttgaattttagaagattttatttttttaagttgatatgattgattttttattagtttatgtgttaagattatttggggttttttaaattagtggtttttaaattattttttttttttgagatagagttttgtttcgtcgtttaggttggagtgtagtggcgtgtttttagtttattgtaatttttattttttaggtttaagcgattttcgtgttttaatttttcgagtagttgggattataggtgtgtattattatgtttgtttaatttttttgtatgtgtagtagagatagggtttttttatgttgtttaggttggtcgagatttttggttttaagtgatttttttgttttggttttttaaagtgttgggattataggtgtgagttattgcgtttagttttaaatttttgtgtttagaagaattattcgatgtagtaaaaatgtatattatggtttttttttaaatcgatttcgtttgattatttgttttttagaggaagggtataatattgtttggagaggagtttgatgggtttttaattttttttttacgttttttagtcggagagtattatgaatagttaaaagaataatattattttttgtaaattttggttttgtaatttttttatatttgggatatggaataatgtatgggttaagggttttaggggttggttttggggttagattgttttgatttaaatcgttgttttattatttattaattgtttgatttggaattagttgtttaatttttttaaattttaatttatttatttataaaatgggggtaatattagtttttattttaaggaggtattgtaaggattttagtattaatttatatgtggtatttagtatagtgtttggaatatagtgagtatttttaaatgatagttattattattattattagtattatttatagtagcggtagtggtgaataaaattaaatttttagtggagttaattagttatttttttttaattagttgtaatttttagtgaaattattacgattatttttttagattaattttattttttagtggaattattgtgattatttttttaggattaattatattatttagcgaaattattgtgaatattgttttggattaattatattttttagtggaattattatgattatttttttaggattaattatattatttagtagaattatcgtgattacgttttttggattaattatattttttagtggaattattataatttttttgttttgggtttattatattttttagtggaattaatataataatcgtaatttttagtgttattagtataagtgtagtttttttagggaatgagggaaggtttaatggatgtttgaggttgtgggaagttattttagttattttggttttggttgtaatggttgtgattttttttatagggtttttttattttatgagtgtttgatgtgtgggaaattttttttttgagggagggagtgtagggaattgaggagggaagtagggtagagagagtagggttattgtgtggttaatagggaatgagaaattaggagagggataaagtaagatagagatagtaggtgagaattagtaagagagagggttagaaaagttggtatatgtttagaggaaattgatgaggagagaaggggttaaaggagtattgaggttggggaggtcgaatggggagtggggatacgtgggatgggagagtattggaagaggggtataattttgaattatttatttttttgttttttagagaaattttttgtgtttaagaaatttttttattaaagatttttatattttaaattttggtttatgtttttaaggatattatggagtttaagatgggttaagtgagattgaaacggattttagagattagtgtttttttataggtatggagttgatgaggagatatagtgtttttaaaggtaggtattttattgtttttagggtggggaggattagcggtttcggttttttttatttgtttttagggttgttttttttagttttgttttagtttttgatatttttattttttgtttagtttttttagatttgaaataggaggttatcgttagtgttgaatgattaaataagtgtatttgttttatgtgatagttagattgtgggtgtgtgtttgtatattgttgtgaagagaggttttttatattatgaggatattttttcgttgtgattttttagtttttaaattttagtatgaaatttagagattttatatttgttttatttttttttttattttttttttgtttttcgaggtttttgggtcgatggaagaacggagttaggagagatgggggaaggtaggtgttggtttttatagacgtgtgttgtatggtaggaaaatagtttttgcgtgagtttagaatatgaattggaggaaagtgattttgtttttatgttgtgaggtaggaaagagtttgttattggggttatttttagatatggttattttttttggttatttacgtttgttttgggttgtaggtgtgagttgttattttttttttttgtgggtttttagtttagtaattgttttgggtagggagaatgtgtttttagtttttgtaagggtaggattggtttgttttgttacggtttagatttttagtagtttttttaaaattaggttttagagggtatatatgttagtgttagtattatgtttaggtttggttttatttaggtttttggtgtaatttgttttcgtattcgtatacgtattttattgattttttttttttgtgaattattcgtttttgttttattagttttattttttgttaagtttttttagtttttgggatttttttgggtttttgggagagttttaataggattaagttgtttttttaagaatattttataatatgatgaataaaattgtttttaggttgggtgcggtggtttatgatgtttgtaattttagtattttgggaggttgaggcgggcggatcgtttgaggttaggagtttaaaattagttttgttaatatggtaaaatttcgtttttattaaaaatataaaaattagtcgggtgtggtggtatatgtttgtagttttagttattcgggaagttgaggtgggaggattgtttgaatttgggaggcggaggttgtagtgagtagagattgcgttattgtattttattgtgggtaatagagaaagattttgtttttaaaataaaataaataaaaaatataataataataataaaatttatttttaatagatgtaagagagtatttattgtataatttatttgtatgaaatttaataataggtaaaattaatttatggtggtagagattagattttttatgagggtgagggtttttaggaagggggtattttttgggtgataggaatgttttttatattaattggtttgttggttatataggtaaatatatttgttaaaatttagttaatagttgggtgtggtggttgacgtttgtaattttagtattttgggaggttgaggtgaaaggattgttttagtttaagagtttgagattagtttgggtaatatggtaagattttatttttataaaatatataaatattagtcgggtatagtaatgtatatttgtagttttagttatttgggaggttgaggtgggatgattgtttgagtttaggaggttaaggttgtagtgagtcgtgatggtgttattgtattttaattcgggtaatagagtgagattttgttttaaaaaaataaaataaaataagaaatttttattaattgaatttttaagatttgtgtattttattttttgtaaattttattttaataggaagaaaaaatgtatattcgggttttttattttgggattttttaatttttatttttatattagggttttaaaataatattttgaagatatttattagtgtatttattattttttttttagttttaagagtttttagattttttcgtaaaataattattattttttgtatttatttttttatttatttatttattatatttattggatatttgtttggtatgaggttttaaggagttggggtagttaggatgattttgtaggttatagttgggtgagggaggtatataagttataggttaacgtattaagtagtatgaatggaagtattataggaggaaatatttaatttgatgaggggaggagaggttgatttatatagaaggtgatatttggattttgaggagttagtaggtatttacgaggagtagaagaggaaatgttaggtaagtaagtagtttgtgtaagattgggtatggtacggttagtgaaggttagaagatttgtggggttggagagtatagtagagggagttggggttgggggttaatgcgtggttttgaatattattttaaggaggttagattttattttttaatagtataaagtttatagattattttaaggtgtagtgggatataattttttttttaataagaatattttaattagttgagtgagtagaaaatagaggttggaaattagtaaaaatggtgttgtaatgtttttgtaaagaaagaagtaaatagataaatttaagattataaaatatggaaatgggaaagaagaaaagaagtggaggttgggtatagtagtttatgtttgtaattttaatattttgggaggttaaagtgggaaaattgtttgagtttaggagtttgagattagtttgggtaatagagtgaggttttgtttttataaaaagttaaaaagattagttaggtgtggtggtgtatatttgtagttttagttgaggtgggaggataatttgagtttagggggttaagtttttattgagttgtgattgcgttatttattttagtttgggtaatagagtgagattttgttttaaaaaaaaaaaaaaaaaaaaaaacgaaaacgagaagaaatgtgaattttaagagatttttgtttagtatttttttaaaaatttttaattttagaatttatggtgatttttgttaaaagttttgttttagggaggtttttatttaacgagttttaggtaatttttttaaaattaatttattaaatgattaattttttgaatttttaaattttgtttaaattttatttagtgtgatttttttttgttgtaggttggaggttgggagatagagggagattggggaatgtttttttgatttatagtatgttttttagttaagaaaatatttaagataaatatatttatttataataatttttatatgaaagattttatttaaaaatatgtgtaagaaaaaattatttatttttgattttgatgaataattgtaaatatgatttttatgaatagtatataaattatatttaaaattataaggttatagattatacgattttttttatatgatattttgaaaatggtaaaattatagggaaagaaataagatttatgttgttagggtttgggaagtgggagaagggttggttttaaaggaacggtatggggggagattgaggaggatgaagggatttagtgcgtcgaatatgtgattttattatttattaaaatttatagaattgtatattataaaaagtgatttttagggtatggaaatttagtaaattaattaggatgtggagggaaagatggaaagtagattttgataaatgatttatgtaagtatagtgaaacggatggagaagaaggagttggtttaagtaattttgaaaaattgttttgagttaggtatggtggtttatgtttgtaattttattattttgggaggttaaggtaggaggtttgtttgagtttaggagtttgagattagttttagtaatatagcgagaatttcgtttttataaaaagttaaaaaaattagttgggtatgatggtgtgtttgtagttttagttgtttaggaggttaggatggagggatcgtttgagtttaggagattaaggttgtagtgttattgtattttagattgggtgatagagtaagattttgttttaaatttaaaaaagaaaaagaaaagaaaaattgtgttttgattataaagttaaagataaaaaaaaaaaaaaatatagaaatattgtattgtagttggtaaatgtgtttttggtaagggtatgaattagtagttttgaaattattatttgtttattagggttgaaaaaataagtaaaaaaatatgtttatagatattcgtagttatgttagagaaaggagttataaataaagaaaagggagagattagaatgaattttatgttgttggattaaagttggaggtgttaaaatgtatttatgtttgtgtttaaaatataggttgagtaatttttatttgaaaatttaaaatgttttaaaatttaaaatttgttgagtattaatatgatattataagttaatatatataaattttgttttatgtataaaattatttaaaatattacgtaaagttatttttaggttatatgtataagatatatataaaatataaataaattttatgtttagatttgggttttatttataagatattttattgtgtatatataaatatttcgaaatttaagaaattgaaaatttaaaatatttacggttttaaatattttagataagggatttaatttgtatatgtagataggtaattgtagaaataaatatagatttgtgtttatgtatgagttagtttatatatatacgttttttagttttaattttcgtgggggtaagaagtagtgatatttattatgaatgagtatatttagtatttaaattttggtttttaaatattattttttaatataaagaggagttagagttttgtggagaaatagttgattttagggtttggatggataaaataaaaaatgagtatgaagtattttgtaatattagaatgtaagaaagtgttttaaaaagggatggagagggttatgtatagtgttttatgtttgtaattttagtattttgggaggtttaggtttggggattatttgaggttcgtgagttggagattagtttgattaatttggagaaaattttttttattaaaataatatagaattagttgggtatggtggtgtatgtttgtaattttagttatttgggaggttgaggtaggagaattatttgaatttaggaagtagaggttgtagtgagtcgagattgtattattgcgttttagtttaggtaacgagaacgaaattttattttatataaaaaaaataaaaaaataaaatattacggatggagaggttgggtatagtggtttgagtttgtaattttagtattttgggaggttaagataagtggattgtttgagtttaggagtttaagattagtttgagtaatatgataaaattttgtttttataaaaaaaaaaaaagttagttgggtgtggtggcgtatatttgttgttttagttatttggaaggttgtggtgggaggattagttgagtttaggatacggagattatagtgagttaatattgtattattgtattttagtatgggtaataaagtgagattttgttttaaaaaataaaataaaatagtaatggagatattagttgggtgtgttggtgtatgtttgtagttttagttatttgtaggaggttgaggtaggaggattttttgagtttaggagtttgaggttgtatgatgatgttattgtaatttagtttaggaaacgtagtgaagttttgttttataaataaaataaaataaaaaaaggatggaggatattaaaacggtattggagtttatttgaaagagtttttagtggttaaagtttgagtaataaaataaatagtgatagtattggattataatttatagaataaaataaatatttatgagtttattttgatataaataaatagttgaataaataaaatggggagagggtacgatttttttttatagaagaattttaattaataaatgtagaaggaatttaatttattattattaggattatatatttgtaatttcgggtgttcgggaggttgaggtaggagaattatttgaatttgggaggggaaggttgttgtgggttgagatcgtgttattgtattttagtttgggtagtaagagtgaaattttgttttaaaaaaatatatatagtattgtattaataataattttttagtttttataattgtatatataattttttagtttttataattgtattatgtaagatattgatatgaggaaaagttaggggaaaaatatacgggaattttgttaattatttttgtaattttttgtaagtttaaaattattttaaaatgaagttttaaaaattttaaaataaagttaaattaaaaaaattttattgatttgtatatgaaaaagggtgaattttattatatgtaaattatattttttgatttagaaaattagatattttttttattatatttttttgaaatttatttattagttatattaaatatatataaatttttttgagtgtgtttaaatattatgtttgaaaatgttgttgggtgatgtggtttatatttgtaattttagtattttgggaggttgatgagggaggattttttgagtttaggagttcgagattagtttgggtaatatagtgagattttgtttttattaaaaataaaaaaataattagttgggtatggtggtgtatgtatatagttttagttatttcggaggttgaggtggaaggattatttgagtttgggagatcgaggttgtagtgagtcgtgatagtattattgtattttaatttgggtaatatagtaagattttgttaaaaagaaagaaagagagagaaagagaaagagaaagaaggaaagaaagaaagaaagaaagaaagaaagaaagaaagaaagaaagaaaggaaggaaggaaggaaggaaaagagaaaatatttaatatatttaaataatattagtagttaatatagttagttatatgtggtaaattagttatttattaaattgatttttaggaaattagttgttttttaagagaggaataattttcggtttatttgtaattttatattttttttttagttagaaggatattgggaaagagagaggttttataaatggtgagagatatttttgaatgaagatgggaattaataatgattttttaaagagtgggtaaggtagggataagggttagagaaggaggaaaagatgtgggtatttttatttaggtttgattttattataagtggattaattttgtgtagtgatatggtttggttttgtttttatagaaattttaatttgaattgtagtttttataattttttttatgttgtggggagttttttttttttcgttaattattttttttttgttatttttatgattgtgaataagttttatgagatttgatgggtttattaggggttttcgtttttgttttttttttatttttttttgtcgttattgtgtaagaagtgttttttgttttttttcgtgattttgaggtttttttagttatgtggaattgtaagtttaattaaatttttttttttttttagttttgggtatgtttttattagtagcgtgaaaatagattaatatatgtagtaattgagaaagtttattggggtgagggtattcgagtagggggagtaaggagagagattcgtgggttggagagaagttaaggaagaggatttgggtggatgattgagtaaagagtgaggttttaagagatagagagattgggtgttttagtttttttatgagtgtttttttttttttgttggaggatttttttttggtttttattaaatgttttttattttttgatatttagttttttttttgttaagtattattttttaggtaggtttggtttatgttttttttggttattttgattttattgtggttatttgtgggaaggaaggtcgaggttttttttgagtattgaaatatcgggtggaggatggtttttaattaggttttatattagaaagtagtgtatttacgttgataggtttgattttttgtggttgttcgattttgggttttggtttaaagttgagagttttttttttttttatgatagttttttttgttttgttcggttatttttttgagtgatagggggtaattgagaagttgtttttttttttaggaaggaagattcggagttttggtttttttcggtaaagtatatataaatttatagttattgcgggtggaaggagaagggtagggtggaaaaagtttgagagaaggagggaggaaaaggtgttttggttagtattatgtggatttttttgagatgagaagaaaatgtttcgttacgttttttttttgttgtttttgttttttttgaggtgtttagaacggggtggaggagttaattttggtgagaaggatgtaaaagttttcgggatttggagagatggagttagggtttttggagaaggagttttttgggatttagatagggttagtttcgagcgaaggtacggaataggtgagtgaattttgggaatttcggattttgttatttatttttaattatttgttatagggaagtagggattttagcgttttttttatatttttttttaaggaaatgttttgtttttgattttgtgtattttatttaagtttttttgttttaatttttttggagaaatgaaaaatttggtatttttttaattttagcgttttgggaggatgagaaggagtgggattttttgagtttaggagtttgagataagtttgggcgatatagtgagatattatttttataaaaattaaaaaaattagttaggcgtggtagtttatgtttgtagtttaatttattcgggaggttgaggtgggaggattatttgaggttaggaggttaaggttgtattgagttatgattgtgttattgaattttagtttgaattatagaataagattttgtgttaaaagagagaaagaaaaagagaaagaaaagaaagaaacggttaggtgtagtggtttatgtttgtaattttagtattttgggaggttgaggcgggtgggttatttgaggttaggtgtttgagattagtttggttagtatggtgaaatttagtttttagtaaaaatataaaaattagttgggtttggtggcgtacgtttgtaattttaaatatttgagaagttgaggtaggagaatcgtttgaatttgggaggtggaggttgtagtgagtggagatcgcgttattgtattttagtttggatgatagagggagatttcgttttaaagaaaaaaaaaaaaaagagagagagagagggaaaggaaggaaggaaggaaggaaggaagatttgaattttattagaaaaatgtggagcgttagtagtagggagggatgattagatttgggtagagtattaaaagtttaaaatttatgttatgtaagttatatgtatttttaagaataagaatatttttaagttttgacggttgtttggggtagtgagggttggagacgaagaggatttattttttttttgtatttatatttgatttagtgttgtttttagtttaattagattatatttatattttttatgattttttttttaagtttgtttttatattattttgaattttttttgtttttaagtttattacgttagttttagatttgatttagaagttgttttatgttttttttttttttttttgagatggagtatttggttagttgttttattttaaattatatattaagtatgatttgagtgtaatttttaatatgaattatagtttttgttttattggtttgttagaatcgtaggtataaatggatgagaggagatatttatgaatatggagttagaatattttaattgttgaaatattagtttagagaggagtgagtttgagaaagagttaggtttagtgttttacggaaagagattagatttggaaaagatagagttaaagttgggtgagtaggttttcgaagggcgtggtttagtaaagataatttatattgtagtgtaagaggatttttgtggaatatgttttattagaattaaattaaaaatgttaaatgatttttaattggaataaattttattatattatttggggagaggtgttatttggatgtgaggatagttatgaaaatattgagtagagtagatgaggataggttattaataatttatattaaatgagattattttttagtaggattaagttaaagtatttttattaagtatttagagattagttttaaagatttaagaataagagaaaatgatgtaattgtagatggaaggattattgaggattatattattgtagatttagggattatcgaggattttgttattgtagatttagggattattgaggataatgtgattgtggatttagggattatcgagggttttgttattgtagatttagcgattattaaggattatgtgtttgtagatttagggattattaaggattttgttattgtagatttagggattatttattgagaattttgttattgtagatttagggattattaaggattttattattgtagatttaaggattatagaggatttcgttattgtagatttagggattattaaatattttattattgtagatttagggattattgaggattttgttattgtagatttagggattattaaatattttattattgtagatttagggattatcgaggatttcgttattgtagatttagggattatagaagatgaaattattaaatatggtgatatttattttttgtgaattattttagttatagtagtgaaatttattaggtttttgatatttatgggaattatttttatatttttggttgtaattatagttattgttgtgttttttgttggattgggttttattgtggtgagtatttggtttgggaatatttagggtattaggggaacgaggttaattgaggataagcggtgggtatggagagttgaggtatagaggtttaagaaatcgttaggcgtgaggaagtttatatagagagagttttgtaaagatttttggaaagatagaggtggagagaaaggaaaagagtatttggtataaaagatgtagaaagtattggggatagaggaagttgtgagagataggaaggagagaaagggaagagaggttgagagtgagaaatataagaatataaatatggtaagatatagcgggagttagggtaaagtatgaatcgttaggtatagatggatgtaaaagaggaaatttttttaagaagataaggaattggggattagaggagtggatgaattagaaatattttgggtggtttatttatattagaaattatatatttttgtgttaattattatttattttgaagttttgaagaagatttttttaaaattaaaattgagtgggtttttatgagttattattattttgtattaaagagatagtttgtattagtttttaaagaggagttttgggtatttttttgtttttgagggtttttgttgtttttataagaggagataaaagaattttatgttagttttgtatgttttattttattaaatttttagttggaattattttaaaagtagtagtagggaaatttttatagggagtggtttaaattttttagagatggggttaattgggattttaaagaaagaagtttagatgttagggtgattaatttaaagtatttattaggggaatttatagaggattgtagtaattttttttgtcgatagggagggaaaagggatgttttgtttaagtatgtttgtagtaagggggttagggtatggagtttatatgagggtttagggaatttgatttagggttggagttagttttttttaacgttttgggtaataatttagatatttttattagtgtttgggagtgtttaaggttttggtttgcgtttaagtttgttggggaaaatttgtagttggttgggttatagaacggttaaggtaatttgtgatttttggttagtttgattagaaagaaaaggaggtgatttgggggattttatattgtggttttttttcgttaatatttgatttaaaatttaagttttttgtttttggtttgttgtttgagggggaagggttggttttttttggttattttgatttacggattaagtgtatgtcgaaattttaataagtggcggtttgtaggattagttaattcgggtaggttattaaagtttcgttaatttttgcggttattgatgttattgtgtattgatttttgttttaagatgtaaatttatagttttggattagtttgtaagtgtgagtaaagtcgaaagtaatgtatgatatagatgaggtgtttatatttaattttgttaaaatgatattatgaaattagagtattttgaaggatgttgataagaggaaaatggaatgaaagcgtttatatgtatttgatttatgtatgagttatgtttagtatttattagtagagggaggattttttggatttcgttgttattataaataattggatttttgattatgtggattattatgaaaagttggatatttttgttttagaataaaagatgtttttttttttttaaattaggtattggtttagagaggttattagtattagtatttttttaattttatgtagagattaaaaataagagatggtttaaaaggtttagggtgtgggaagtaagaggaaagtttatgtttttaaatttgttaaatttttgatttttaaatttttaattcgaaaagttttaaaaataagaattatattattattttttttaagttttatttgttaaaatgtttttttttttaaattttaatggtttaagttttttttaagttgttttaaaaaaaataaaaaaggtttaagttttttttggtagggtgcggtgtttacgtttgtaattttagtattttgggaggtcgaggtgggtggattacgaggttaggattttaaggttagtttggttaatatggtgaaattttatttttattaaaattataaaaaagttagttagttatagtggtgggtatttgtaattttagttatttgagagattgaggtagagaattgtttgaattcgggaggtagaggttgtagtgagttgagatcgtgttattgtattttagcgtgggtaatagagcgagattttatttaaaaaaaaaaaaaaataaaaggtttttttttttttttaaatgtcgtttatatttttggtaagtattgatttttagtagttagtgttaggatttgaagaaaatagtgatatttagtagatttttagagttagggaaataggttgggtagaagtgataaattataaattattagggttaagagaagaatagagtgttaaaattaaattattttttttttttttagaaagagtgttttttgtttttattaaatttatttattagggttatttattatttttatgttatggattatagtatattataaagaggattttagtagtgattatagttggttttagaaaaaggagattttttattcgtttttgtaagattatatagtatgatgtgtatttttaggtttttattttttcgttttagtttggagttttgggattattatatgaggaaggtagttggtttttggaataagtatgtggaggatatttagaaggatgtttatttgttttgagtgttttttaattttgtttgattttggttattttttttggataatcgtttttatttatttattaggttttgaggaattatatatagtttaggtataagagatattcggtaagtttgattaaattaataaagtaaattttatttgtttttgtttgggatatatttttatatttatttatttaattaaaaaaaaaaaaaatgttttttttgagacgaagttttgtttttttgtttcggttggagtgaagtggcgcgattttagtttattgtaatttttgttttttaggtttaagtgatttttttgttttagtttttttagtagttgggattataggcgtatgttattacgtttggttaatttttgtatttatagtagagataagggttttattatgttggttaggttggtttcgaatttttgattttaggtgatttattcgttttggttttttaaagtgttaggattataggtatgagttatcgtatttggttttaataaaatatttatttagtgtttagtatgagtttaatattttacgttttttagtttgtttattttagtttatttgtaagttgaaggatataatttattttttaagaggattatgttcgcgtttttttattatttaggttaaagggttatatttataggatgtagttaattggttatttagtaagtatgtatgagtatttgtgtgggattggttatcgtagtaaataaatgagttttattttagttaatcgcggtgtgaaatgaggatacgaagtttagatttaatttttaagagaaaagttttgtttgatagaagaagagatttgtttttatttaatgtaaatgtattatatttatgtatttatgaatgatggttaagattatagataaggtcggggtattggatataatagttttgtgaggagtttaggataaaaattaaagaattaaagatatgtgaagatagttgattattgtttgtttattattgatgttattatgagtagtattattattagtgttaaataatggaattgtagtattatgatatagagtcggaaatacggaataataaattaaaatattaaagtgaaaaaattggattgattaaataaatattaaattaatattttttagatttatgtgataaatatttttaaaggaaaagatatatatatatttttgagatagagttttattttgttgtttaggttggagtttagtggtgcgattttggtttattgtaatttttattttttgggtttaagcgattttttttttttagttttcgagtagttgggattataggcgtgtattattatgtttggttaatttttgtatttttagtagagatggagttttattatgttgtttaggttggttttgaatttttgattttaggtgatttattcgttttggttttttaaagtgttgggattatagtgtgggttatcgtgtttggttggaaaagagattttttgagaattcgttatgttggtttaaacgtaaatatatatgaaatagaaaatgaagtataaattttttatgtttatagttttattgttttaataacgttagaagtaatagtagtagtttaatgtaatgtatgatatttttttattgaagaatttttcgttttaatattaatattgtagtgattgttatagtttagttttttaaattttatttgttatttgatgtttttttttttttatggatcgtttttgtataagtttttttaagatttttagttttttagttagttgcgggattattgggtttttaatgtaaatgtatcgtttaaattttaagatagttttcgttttatttttgttaggttgtgtaattgtaaagattaattatttttattagttttatgttggttttatattggttattaatagaatttaggaaatgtttatattatggggatttttaagattattatttgaaggaaaacgtgatagaaatagttttagttttttttttttttatatttggagaatttgagttttgggggtgatggtaatgtgtttagttgaagaaaattattttttaaatttttaatttttcggttttttttgtagttagtgtagtgaggagatatagttttggttaatgtgataaaggtataagtttttggggatggtgttttttttagatgaaaaggttaaagtttatgaggagaaagttttttgttttttttttttcgtttttttttttatttggaatgtagatatgagatttggggtttagtaatgttgaggttagggggagatttatagtagggtgaaggttttaagttgagagtggagtagagggaagaaattatttgggtgttcgatggtaatattgagttttgggttgtttttttcggatatttcgtatatgagatgagtagtgtgtcggagtttagtgaggtgagttttttgtgattttagttaaatgggattttaaatgatatgatatataaatattatttagaatatgtagatttttgcgaatatttttatgatatatttgggaagatatagtgtttaggattttaagaatgtgggagttatatatagtggggaatgggagaataataaaatgattttttttttttgtttttatggaggtagtaagtggttaagggagaattttgtgattagagatatttgtatgaatattagtttattgtaggaaaaaagagtgatagaagagttttttggttaatatataggtaggaaaagtttaatgtgtttttataaaattttttttttgaagtttaggttggggtttggggttgggtatttgttaaagggtattggtaagtataaggaattttagaatttgttttggtttttaagggggtagaatttttggtttcggtataagttaggtttgtgtaataaataaaggaattgttagagttataaattttagttgagaagtttgtgtgtttgagtttttgtattttaaggataatttagagtaattgaagagattatgaaatttttgtaaatggtatagaaattttagtatgtaaaagtatgtatgtaaaaacgttagtatattaaaagtttttttttttttttaattaagttaatttttggttaggtaggatgatatatttgtaatcgtagtattttggtagatcgaggtaggaagattatttgagtttagaagatttatattagtttgggtaatatggtgagattttgtttttattaaaaataaaaaaaaaattagtcgagtgtggtggtatatgtttgtaggtttagatatttgggaggttaaggtaagaggttcgtttgagtttaggaggtggaggttgtagtgagttatgattgtgttattgtattttagttcgggcgatagagtaagattttgttttaaaaaaaaaagaaaaaaagaaagaaagaaagaaaaaggttgggtatagtggtttacgtttgtaattttaatattttgggaggttgaggtaggaggattgtttgaggtttggagtttaagattagtttgggtaatatagtgagatttcgtttttataaaaaaattaaaaattagttgggtatggtagtgtatgtttgtagttttagttatttgggaggttgaggtgagaggattgtttgagtttaggaggtcgaggtagtagtgagttgtgattatgttattgttttttattttgggtaatagagagagattttgtttcgaagagaaaaataaaagaaagaaaatgttaatttttgtttttgttagattagagggaaatttaattttagtttttttgttgttttttaaagattttagagttgtatataggattgaagtataaggaatatttttaaagttagtagtaattggtttgtattaattatttttaggatacgtatatttttttgtggtagtagttttgttagaggtataggggttttatttagttagttttttttaatttgttacgtagttttttttagaataagtttatttttttagggtgttatcgtgaaggagagtatggttttggtatttgagagtttagagagatatatatgaagatttggtttttggagagtattgaaggtagaaaagataaggagaagatgttgtagaatatttataagggaagaaaaaaaaaatgaagttttaatgaataagggaaatatttttttaattatttttgggatttgaattataagatttggtagttgatttttaaattataatatatttatatttagatgatatttataagttgtcgtatatatttgtgtattttatgtttttggtaaatgtatatagttaattatatagttaattttttttttttttttatgaagtttagtgtttaaaggatttttttaggtgttattaaggagttatattaggtttagttgaatttaatttgtataagtttagattgaggatattaggtaagtaagtatatttttttagattgtgtttgaataggatttatgttttttggggagtgttattttttattaaaacgtttgcgaatgtatattttggtttagttttttgtttttttaaataagaatgtttggtgaagtaatagtgatttaatatttttttttagcgaggtattgtttgatattttagaaaatacgtagttattttttagatttatttaggattttttttgtgatttatttaaaataaatttttttttttagtttttatagattattatatttattttttttatggagttgacgataatttgaatttatgtttatttacgtgttaatttatttgttttatgtttgtttttttttattagaatgttagttttttgagaataggggttttgaggataatatatgagatagattagatatttaataattatatgttttattgagtttttgatgtatattttttttattggatcgtaatttaaaattgagatgtcggatgggcgtagtggtttatatttgtaaatttagtattttgggaggttgaggtaggtggattatttgacgttaggagttggagattagtttggttaatatagtgaaatttcgtttttattaaaaatataaaaattagttgggcgttggtggtatatatttgtagttttagttatttaggaggttgaggtaagagaattatttgaatttgggaggtggaggttgtagtgagtcgagattgtattattgtattttagtttgggtgatagagtgagatgttgttttaaaaaaataataataaaaataaaatggagatgtttattggttgtagtggtttaggtttgtaattttaggatttttggaggataaggtgggaggattgtttagagttaggagttagagatttgtttgggtaatatcgtaagatattgtttaaaaaaaaaaattaagaaacgtttaaaaatggaaaagtgttttatatttgatagtatattatgaattagttagtagtatttttttttttttagtggggtataagtaatgttgtattttgtatttaacgttattttagatgggatgaaatatatattttggaataaacgaataaatgtatgtttttttttggtgttattttttttgttttggttttatttgtaaatataaggaaattaggatttttttttttttttttttgagatagagttttattttgttatttaggttggattgtaatggtgtggttttagtttattgtaattttcgttttttaggtttaagtaatttttttgttttagttttttgagtagttgggattataggcgcgtgttattatattcggttaatttttgtatttttagtagagatagggttttattatgatggttaggttgatttcgaatttttgattttgtgatttatttattttggttttttagagtgttgggattataggtatgagttattgtatttggtttaggatttttttagtaattgtttagtatggtgttgggaatttttttgggaatagaggtagttaattaatagaagtgaatgatatagtttttatttttaaggataagaaaattagtaattatagtgtaatatgttaagtgttataataaaggaatgttttcgggtagagtttagagaagggattttatttagtttgtgtagattttggaaagttttttaagggatagggtaattgatcggagatttgtgatatatttgtggggtattttgagttgttgttatatatgtggatttttttgatttttatattatttttgtgaggtaggagaattattttgttttagaaatgtaaagattgaagtttagagaagttaaataaattgtttttaaatttttttaacggtaagtggtagggaggggtggggggtgagggagttaaatttaggttttttggttttaggattatttattttttattttatttggattgaattttaagtgatgaattgttttgtattgtttttataaaaattatttataggtatgaatatttttattttttagtttttttttttttaggtttgtaatggtaggttttcggattttttttttaatttgtattgggttttgagttaagtaagaaaaattagatatagtttttatttttgaggagtttttagtttgaaaataagtcgtggatatatagaaaaaatatttttgtgtgtgtgatggatggtagggaacgtgttattaattgtgatatttatggtatttatttgtttttattagtgagttttgttttttaagatgtttgcgattttttaggttttatttttaaaagaatttgaaaattgaatataagtagagatgttttgtttttaatttaggattttatttagagttttttaggtagtaattttgaattaagttggtttcgaggtattcgtgagtttttatatttagaagatttttttagtttttattttttatttatgaaaggaggtggtatggatgttttttttttttttttttttttttttttttttagtatttattgattatttttgggtgtttttcggagagggggatttggtagggttataggataatagtggagggaaggttagtagataaataagtgaataagggtttttggtttttttaggtagaggatttcgcggtttttcgtagtgtttgtgtttttgggtatttgagattagggagtggtgatgatttttaacgagtatgttgtttttaagtatttgtttaataaagtatatggtgtatcgtttttaatttatttaattttgagtggatatagtatatgttttagagagtacggggttgggggtaaggttatagattaatagtattttaaggtagaagaattttttttagtatagaataaaatggagttttttttgtttatttttttttatatagatatagtaataatttgatttttttattttttttttatatttttttttttttattcgataaaatcgttatcgttattatggtcggtttttaatgagttgttgggtttattttttagacggggtggttgtcgggtagaggggttttttattttttagtcggggttgtcgggcggaggtgttttttatttttcggatagggcggttggtcgggcgggggttgtttttttatttttttttttgacggggcggttgtcgggcggagatgttttttattttttagacggggcggttgtcgggcggaggggttttttattttttagacggggcggtcgggtagagacgttttttattttttagacggggtcgcggttgggtagaggcgttttttatattttagacgtggcggcggggtagaggcgttttttatattttagacgatgggcggttcggtagagatgttttttattttttagatgggatggcggtcgggaagaggcgttttttattttttagattgggcggttaggtagaggggttttttatattttagataatgggcggttaggtagagacgttttttattttttagacggggtggtagtcgggtagaggttgtaatttcggtattttgggaggttaaggtaggtagttggaaggtggaggttgtagttagtcgagattacgttattgtattttagtttgggtaatattgagtattgagtgattgagatttcgtttgtaattttagtatttcgggaggtcgaggttggtagattattcgcggttaggagttggagattagttcggttaatatagcgaaatttcgtttttattaaaaaaataggaaaattaattaggcgtggcggcgcgcgtttgtaattttaggtattgggtaggttgagataggagaattaggtagggaggttgtagtgagttgagatggtggtagtatagtttagtttcggttcggtattagagggagatcgtggagagagagggagagggagagggagagggagatagtggggaaagggagagggagatcgtggggagagggagggggagagggagatcgcggggagagggagagggagagggagggggagagggagatcgtggggagagggagagggagggggagagggagatcgtggggagagggagagggagagggaggagagggagagggaggggagggagagggaggagagggaggagagggagagggaggagagggagagggaggagagggagagggggagggggaggtgagggagggggagggggagggagagggagagggaggagattggatgttttttttgattatttattatatttttgtagaggatatataagtttgtgtatggttatgagaatatagtggagagttatgtaaatagtttttgtttttaaggtgtttggtagaagcgaatgaatattgttgttatgtatatgtaaacgttgtgaaatgttttaatgttttatattttttttggagatttttaagaaatttatggaatttttagtagtgatatttattattaataatgtaattaaatggggtagtaagtaaaatgagttattattaatgtattatggagtagaggaatttttttttgcgttaatattataatagatttatttttttatttggattagtatttattatttgtgtttagttgtttgtagtggatatttaatttgtgaagtgagttgaggtataatgtagtattgtatattggaatataggggttgtaaaagtagaatttattaataaagttaaatgttatgaacgttataattgatgaaaattggttatttgaaaaatttagatatgataaaattgttaaattgatgaggatgaagattggattatagtatatatttagtatgtaaaaatagataattaggggaaatgtagtgatagttaaagtaattatggaaataatatttatggtaataaatggtttggtcggaagagaggtttaaagattgtttgtgtttttttgatgaaatgtttggtagttttttagtggtaatgatcgggtagtggttttttgcgagatgggcgtttttttggagattgagcgttatttttgagggtttggagaagttgatttgttttgtattttacggggttatttttatttttttttttttttgtatttattgatatgagatataacgtatgtttataaataattgttgttttttattgtatttaaagtttcgttgtcggaaaatatattattattttatgtagtattaagaggaaaatatagcgggttaaattatgatacgttattgattgtaagacgtatttttatttaagagatgataaatgggaaaataaatatatgttttataatttataaaatataaatgattttcggtatttatattatattatagggtgaggtggtttatatttgtaattttagtattttgggaggtcgaggcgagtggtttgtttgagtttaggagttggagattagttcggataatatagtaagattttgtatttaaaaaatatatatatatatatgtatatatatatatatatatatatatataaatgatttttagtgatttatttaatatttttagatatttgtttttttataaattaaataattaaattattaattaattaatttatttattttatttatatttattaagtgtggattattggataagtatattgacgttaatattgaggatatagtagtgagttggtgttttgtttttagggggtttttgttatagtgatttggtttttgattatttttgttatattgaatttgtgagttagtgagttcgtgattttaagtgagttttagagtgaaaatagatattagataagaagttagaaaatttgggttttagtttagtttttttttttaatagtttatttaatttgttttaattttattttatttatttatagtttattacggttaaattgagaaatagttatattttttttatagtagagttttttaaataatacgtaatgataattaaaatagtaaagtagttgtggaaatagtgtttatggcgattaatggttttatttttttttttttttttttttttttttttttttttttttttttttttttttttttttttttttttaaggtttttgagttttaagttaagtttaaaaaaaattttaagtttttttaatttgttggaatgtagtggtatgattatggtttatagaagttttaattttattggtttaagtaatttttttattttagttttttaaatagttgggattataggtatgtattattatgttttgttacgttttatttttatttttttaataaagattaggttttattatgttgtttaggttggttttgaatttttggatttaaggtattttttagttttagttttttaaagtgttgggattataggtatgagttatagtatatggattttattttttttttatgttattagattaagaaagttttagagttttttttgttttttttaggtgttaagtaatattattttatgtatataaatatttaatttagaatagttttattttttttttttattgttttgtataaagtttttttttttttagtggatagattgtaatgggttggtatttgatatttgtttgtagattttatggtaggagataggttggttttttgttttgggagtgggagtgtaggaaaggaggaggtattggggatttgtattttaggtttttagggtaaggttgtgtaagtatttttagtagattagtgtgaggtatgttaggaagcgagttgatgtggagtcgagttaattttgtttgatgtggttatttataggtattaataggttttagtagagagaagttgaagtgattattgtatttttatgagttgtgggaggaataaatcgtggaaagaaatttttatttgtaattgtatggtattaggggtgaggggtttcggaagaagtatttaaggaggaggaattttttgtaagtttttattagttttagagaatgtaaagtttttttgtaaatcgtgtttgttttacgttttagattatttttttttttaatttttttttattttatttaattttggagggttagaaattattattagtaagataggagaagaaggatagatgtataatgttgaggatttgtttttttattttttatttttttatttttgtaaagtttttgttggaggaaaggagatttatttttggaattaaacgttgagtttttgaattggtattgtgtttggtaatataaaataattataggatttaagagagattagaatagttttagtattgtttatatttttattttggaatggggaaaattggttttattgagtaagttaaggacgttatagattgatttgtagatgtttaatgaaatttgtaatttaagattaaataacgtatttttggttgggtatagtggtttacgtttgtaattttagtattttgggaggtcgaggaggcgggcggagggtagattattcgagggtaggagtttgagattagtttggttaaagtggtgaaattttatttttattaaaaatataaaaattagttaggcgtggtggtgtgtatttgtaattttagttattcgggaggttgaggtaggagaattatttgaatttacgagatagaggttatagtgagttaagattatgttattgtattttagtttgggttataagagtaagattttattttaaggaaaaaaaattaattaataataataatttatttttgagatatatgcgatgtaagataagtatttattgttaggatttttttaggtaagttgtgtagtaagtttgtgttgttttatatggtagttattagttatatgtagtaattgagtatatgaagtgtggttagtttaaatataaatgtgtttttaagtgtaagatatatatgagattttaaagatttagtataaaaatagtaaaatattttattaataatttttatgtttattatttgttaaaattataatattttggatatgttgtgttaaataaaatttattattagaattaattttatttgttgttttttatttttttgatgtgattattagaattttgtaaattatacggagttcgttttttgtggatatgtagttttttttatagagaaatatatgtatatttttgttggatatgtagttttttttataggttataaggtattgaggttataggttataggttgggatgttttttttttagagagtagtttatttttattttaaattattttaaagaatataggtattggtaggtaggtgggtcgtaagttggattgagtggggaaattttttgttgtttttgaattagaataagaatagagttgggagtttgtattttgtatagtgaaggtatatttaagggagttatttattttggggagttatgttggtttttaaaatttagagcgtgttaaaggtgaggtagagaagttttttgtagtaagtgtatatagggaggggcgtgggtttttgaaatttgaaagtattatgttttatttttagttttaagtgtatttggaatttttttttgttatttttaggtttttagtggagtttgattaaatatgaggttgagggtagttgtgggagttgagggtggattttgtgtttattcgtggtttttttattggttatggttttttttttagtaggtttcgatagtagtttttggagtttttggtttagtttgttgcgggtcgttgttgttttttttgtgttttttagtttgtgattttaatgtagttattttatttttgggaatttatttaatttttaattgtgtaaaaagttttataaataaaaaaagtgtattatagtttattattttaataaaatattggaagtagtagaaatatttagtagtaaaaattataaattatagattatgtattttgtgtattattgggaagttatttaagtgatttttattaaaatttatattaataaagaagataatagtgttataataatttatttaaaaagaattaaaggttaggtatagtggtttatgttgtaattttagtattttgggaggtcgaggttggcggattatttgaggttatggtaaaattttatttttattaaaaatataaaaattagttaggcgtggttggtgggtgtttgtaattttagttatttgggaggttgaggtacgagaattttttgaattcggtaggtagaggttgtagtgaatagagattacgttattttattttattttgggtgatagaattagattgttttaaaaataaataaataaataaatataaggaattaaggaatatataattatatatgtaattggtgataataaaatataattttttaaaaagaataaaaataaaaatttaaataataataattatttaggtataaagaaaagattagaaaaaaatgttttaaaatgaaattataattgtattagggttttttagagaaatagaattaaaatttttttttttttgttttttttttttttttatatagatgagaagatatatttaaaggagtttatataggtgagagagagattttaaggaattggtttatacgattgtggagattggtaagtttaaaatttgtagggaaaattggtaggtttggagataaaagttaatgttatagtttaggtttaagggtaatttggaggtagaatttttttttttttgggggatgttagatttatttatatacgggagggtaatttgttttatttaaagtttatttatttaaatgttgattttatttataaaatattttagtagaaatatttagaataatgtttgattaaatatttgggtattatggtttaagtatattgatatatgaaattaatttttggttgggtatagtagtttatttttgtaattttagtattttgggaggtttagatgggtggattgtttgagtttaggagtttaagattagtttggggaatatagtgagattttgtttttataaaaaataacgagaaaaaattagttaggtatggtggcgagtgtttgtggttttagttgttcgggaggttgaggtgggaggattttttgagtttgagaagttgaggttgtagtgagtcgtgattgtgttattgtattttagttcgagtgatagagtaagattatgttttaaaaaattaattaatttattaaatttaataaatatttttaaaaattaatttttataatgatttaaggtttattattttaggatttgtttttgaaatatttttttgtgttttttaaaatatataaaataataaagatgtatttatgatggaaaaggtttgtgtaaatatattttaaaatatagtttttttggggtagttttagagttttagggttttttatggttttttggatattttttatagtattttttatttttgttttttattattattatgtatgtttgaatatgtttttttttgttaaatattaaatagagttttaggattgggattttagaaagtgagagaaggtaggcgtagaggaggtagtgggagtttgtttgagggtattaacgttagttttgggttatgtgttggttttttaggatcgtttttttgaggggtatagatacgtgagtggagggagtttatgttttagtttttttgtaaaaattaatttgataaagttttttttgttttgttaaaattgtttaaaattttttagtaatattttatttgattttttttaatggtttttgttatttttttgagttttaatttattgtttatgttttaatattttagtttatgttttgtttaatttaatgtttatatagttgatttttgagtaatatggatttgaattgtataggtttatttaggtttatttatgtatgggttatttttaattaaatgtagattataaatatagtaatggtgatatgtgaaatttatgtatataaaggtttaattttatatatatttgggatttaaagggttgattgtgggatttgaatatgtgtaggttttggtatatataggagttttggaattaattttttttatatattaagggattattgtatatttgttttgtttattttttttttttttttttgaggtggagttttattttgttgtttaggttggagtgtagtggcgttatttcggtttattgtaattttcggttttcgggtttaagtgatttttttgttttagatttttaagtatttgggattttagttattcgttacgtttagttaattttttgtatttttagtagagacggggatttattatgtcggttaggttgatttttaatttttgattttaagtgattcgttagttttagttttttaaagtgttgggattatagtcgtgagttacggtggttagttttattattatttgttaagaatttatttgggcgggtaataggtatatatcgttttatgaaaattgagttatttagtttgtgtttttatttggatagaatattatgtagtttttgtttagagatgttttataggagttagtgtggaaatattagggttaggtattttttagaaaattattttgggattgttttagtttatgaattagtagttaattgagttattagttatattataaagtatgattataattacgtaggtttggtttttaattttatgttgttatagtaaaatataatttatttttattttagaaaaagaaaaaaagttagatgtgatggtatatgtttgtagttttggttatttggggggttgagttagaggattagttgagtttaggagtttaaggttatagttagttgattgtattattgtattttagtttgggtaatagagggagattatttttaaataaaataagataaaaataataataaaaaaaaaatagaagaagaaaatatattaaaatgttaataatgttttttatttttatttattggggttagaaattatttttgtttttttatattatgtatattttattttaaatttgataattttttttttttttttgagataggatttcgttttgttgtttagggtggagggtagtggtgcgatttcggtttattgtagttttagttttttaggtttaggtaatttttttattttagttttttgagtagttggggttataagaatacgttattatgtttggttaattttgttcgttttttgtagagatggagattttattacgttgtttaggttggttgtaaatttttggatttaagtttttttgtttcggttttttaaagtgttgggattataggcgtgagttattatgtttagttaatgttatttaatttatttatttttatttatttatttttttgagatagggttttattttgttgtttagattagagtgtagtggtgtaattatggtttatcgtaattttaatttttttgggttgaggtgatttttttattttagttttttaagtagttgggattataggtgtgagttattatatttggttaatttttgtattttttgtagagatgggggttttattatgttgtttaggttggttttgaatttttggatttaagttatttttttatttcggtgttttaaagtgttggtattatagatgtgagttattatgtttagttttatttttaaaagaaggagaaaattattgagtaagagagtttttttgtagtttttaagattgttgttagaattattttaatattttttttgtagtttgtgttttgagtagtaatataaaaatgtagtattttatgagtattaatagtagggaatgtaaattagtttatttgttttggttttgttttgtttttgattattagaggttagtaaaaatagaatgagaattgtaaatttttttttgttttcggaagatttttttatagtatggtatattagttagatttttgggttgttttattttcgttttcgtaagaaaggattttgttggaaatatattgaggtatatattgaagtagaggttttagtgttatttgggtagaggtaagttagagaaaatagagggaaatgaaaagaaagattttttggtatttatttttatatattgttagttaagttgcgttgggtatttagagtttatttattatatttatattataaatttaattgggatttcgggttttttttttttttttttgagtttgagtttcgtttttggtttttaggttggagtatagtggtaggattttggtttattataattttcgttttttgggtttaagtgatttttttgttttagtttttttgagtagttgggattataggtatgtattattacggttggttaagttttttgtttttttttttttagtatagacggggtttttttatgttggttaggttggttttgaatttttaattttagatgattcgtttattttggttttttaaagtgttgggattataggtttgagttattgtgtttggtcgggtttttaggttttatgtagttgattgaatataattatttttgtttttagtagaaattttattaaaatgtgataaaggggttttaaaaggtaaggattgataagaataaaaggcggggggagaggagagagagagagagagagagagaaattgattatataatttaaataaatagagaataatgatttggataataaatagataaaggttttagtagataagagaaatttaaaggtaaaatgttagtgggagaattttagaagtaggttgattttatatagtagaattttagtaaggaatggagaaattaagtattttaaacgtgagtgtgtaagaggtttggaattagaggttgatggtttatgtaagaagttattagaattttagattttttaatttaacgtatatggtagagtgattttttatattttattttaatgagtggtttgttcgttggaggcgttgaattatgttatattttgggaattataatgaaaattatttaaggttgggcgtgatagtttatgtttataattttagtattttgggaggttaaggtaggaggattatttgagtttaggaatttaagattagtttaggtaatagagtaagatttttagttttattaaaaaaaaaaaaattatatatatatatatatagtttatggttttttggttttatgtggttagaagaaaataaaataaaataatttaaaaaatagaaaataagtaataataaaagaaataaaataagagaagtaataaaagaaaagaaaaagttatttaggattatgtaaaagtttgtttatcgaatagtaaggttttttggttttttttatgaagttggttttgagaattttagtagttagatttgttttaggtcgattaatagagaaattttttttggagaaattgattagataaggaaaaatatttaggaatataggagtaagggggttttgacggatattaagttattgttatttgattttaaaatttttttttatttttttttttttagttggtttttttttaggtgtagagggaggtgttagtattggaggaagaagggatttttttttttgttggttttttaattttgtcggtattattatagtcgaggatttttagttttgtagtaatagttggtttagtagtagtagtaagttttaaattgtggtttttttttattttcggtaaaggttttttttcgtggttttagtgatatcggtttattggttaggtttttttttaggaaattgaattttagtttcgtggggttatttttttagatttttttattgaataatattgatttttttttttagttttttaagattgagggagaggtagttgttttatttttgatttttacgcgttttatttttgcggtattttagtgttttttttgtttttttagattttaatatgtggttaataattttttatataaaattatttttgtttgggcgcggaggtttacgtttgtaattttagtattttgggaggtcgaggtaggtggattatttgaggttaggagtttgagattagtttggttaatatggtgaaattttgtttttattaaaaatataaaatttagttgggtgtggtggtaggtgtttgtaattttattatttgggaggttgaggtaggagaattatttgaattcgggagatcgaggttgtagtgagtcgagattgtgttattgtattttagtttgggtaatagagtgaaatttttttttaaatagaataaaataaaataaaattatttttgtttaaatatttggattttttttttttatttgattagattttaatataagggttttttggagaaatagtttagtttatttgtattatggtgaagtttattgaaatttttttttatttttaatatatatatttggagtttttaaatagtttaagatttaattaagttaaggattattgtattatttataaagtttaagttttaatttgagtagagaaagtttattattagaaagaattattggttgtaataggttaaaaagacgtgtagagaattttaaagaatgttgtagggtcgcgggagagtatttaaagaaggatatacgtggaagtatttttattttaaagttggatttagaatttaaggtagaaagtgtgtatgtgtttattaggtattagattatttttttgggatgtttaggttaaagtttgtgaatagttatgagtaagtaggaaattgggggggtcgcggtatcgggagtttatttattgtatgtaaggtttggggtatgtagggtttacgttagggttagttcgttgggggaacgtatgttgttagtacgtagttaggatagagattatcggatgtttttatttggttattgatgggttttgtcgtaggagtaataagaattataaattatagttttcggaattagagataaaagaaatttttttttttggtagtgttttttcggcgttttttattgagaaagtttaatattgtgttggttgcgaaggagaatcgtttaatttaatatagattagttaagaggatggatttacggttgagaggtaatatattgataagaaattagttattatgggatgaaaattattgatatgaaagataggtattgaaaatataagaattaaggaatataaagttaggcgcggtggtttacgtttgtaattttagtgttttcgtaagttaagttgggcggatcgtttgagtttaagagtttaagaatagtttgagtaaaatggcgagattttgtgtttataaaaagtataaaaattagtcgggcgcggtggcgtgtatttgtagttttagttgtttaggaggttgagatgggaggattatttgagttcgggaggtcgaggttttattgagttgtgattaagttattgttttggattataatagagagattttgttaaaaaaaaaaaaaaaaaaaaaagaagaagaagaagaagaggaaatttagagaatgtaaagagttaaataataaaatttattgtaattaatatttttataaatataagagacgatattttttttatggtaaaagaatatattattaaataaaaaatttaaagttgaagaaattttttaaaaagaagtaaagggtaaagaaatgtagatgggatcgggtatagtagtttaggtttgtaattttagtattttgagttgcggaagtgggtggattatttgagattaggagttcgagattagttttattaatatagtgaaatttcgtttttattaaaaatataaaaattagttaggcgtggtggtatacgtttgtaattttagttatttgggaggttaaggtaggagaatcgtttgaattcgagagaggtggagattggagtgagtcgagatagtgttattatattttaatttgggtgattttattttaaaagaaaaaaaaaaaggaaaagaaatgtagatggtatagaaaatatatgaaaattagattatttggatgaataggaggatttttagaaagaatagatagagggaatagaagggatgaaattattaaagaaataatttaagaattttttttagaattgagagatatggttttaaagtgagatagattttaagtgtttaatagaagtgtttaataaaaggaatgaaatttaaggtatattattataattttaaaaatattgaggataaaaagaaaaattttaaaattggataaaaagaaaaaaataggttatatgaaaaagattaaaatttaaatggtatagggttttttttttttttttttttttttttttttttttttttttttttttttgagataggattttattttgttatttaggttggagcgtagtgatataattatggattattgtagttttgaatttttgggtttaagggatcgtttttttttagttttttgaaaattatagatacgtattattatgtttagttaatttttaaatttaattttattttttgtagagacgaaattttattacgttgtttaggttggttttgaatttttgggtttaagtaatttttttattttggttttttaaagtgttggtattataggtgcgtattataatatttagttgaggattttttaatagtagtattggaagttggaagatagtggagtagtgtttttttaatttaggtgtaaattttataatttggaattttatttttagtaaaattattaattagatgtaattataatataaaagatatttttagataaaattttaaaaattgtttttttttgtttttttttttaggaagttttattaaagtaagggattagattaggagagataaagatgtgggattttttaaagagtgaggagaatgaaaattttaggaggttgttgtgtaggagaattagggattcgtaggtttagattaaaatggtttggaggtcgggtatggtggtttttgtttgtaattttagtattttgtgaagttaaggcgggtggattatttgaggttaggagtttgagattagttcggttaatatagtgaaatttcgtttttattaaaaatatataaaagaattagttgggtatggtggtatatgtttgtaattttaattatttaagaggcggaggtagagaattttttgaatttagaaggtagaagttgtagtgagttaagattttattattgtatttttgtttgggtgatagagtggattttaaaaagaaaaaagaaaaaaaaaaaaggtttggggttaaaattttagggattaagaaaatttttttatttggttatagaaagatattattaagaaaaagagggaattgattaattgtaatatattagattgtagagaaaaaatagatttttatagaatttgttgataaatttgtgataaatttatagataaatgattaaaagaaaatttagtagatttgtataattttggatattattttataaagtttagtttagaatttgtgtttttagtttttataaagattttaaaagtttttaatattttttgtaaaatgtttttttgttaatttatttagcgtaatttttagttgttgtattgaattttgattgatataatttgttattaagaaataggaagataaaaattaattgagtatcgaagtgtttttatttttaggaagagagaattaggggttggtatcggattatagtttttgttttgtttttggttttttaaattatatatttgtaatttatatatatatatatatatatttggtttttaaaattatatatttgtataaatttgataaaaattttaaatagttaaataaaaatttatttaggagataatatattagaatattaagatgagtgttgagtttaaaaaataaaaaggttaggagcggtggtttatatttgtaattttagtattttgggaggttaaggtgggtggattatttgaggttaggagtttgagattagtttgattaatatggtgaaattttgtttttattaaaaatataaaaaaattagttggggatggtggtaggtgtttgggtaatagagtgagatttcgtttaaaaatgaaagtggtatttgatatagagaagattagtatggtttttgtttaaggatgatatataaatttgtgaagggttttatttaaaaaaaaaaaaaagtttgagcgaggtggtttagttttgtaattttagtatttcgggaggttaaggcgggaggattatttgaggttaggggtttaagtttagtttggttaatatggcgaaatttcgtttgtattaaagtatagaaaaattagttgggtatggtggtgtatgtttgtagttttagttttagttatttcggaggttgaggtagtagaattgtttgaatttaggaggcggaggttgtagtgagttgagattatgttattgtattttagtttgggtaagaagagtaaaattttattttaaaaaaaaaaaaagggtatttgaatatatataattataatgttaataaaaatagataaatgaataaatatagttagtttttttttttttaatggtatttggatatttttatattttggaagatttataaatatatagtggggatattttttataaatgtataagttttttagtttttttttttaatgtattgtagattgtttttatttagtttttttttttgggaatttgagattgagagtagtgtaagttatgttttttttgtaaatatagtattttatatttttagaagataattttaagtaaattttagggttttacgtcggttattattttatttgtttttttttgttttgattttttttattttttagaaatttaaggtttttttagttaaacggagttgttgtggtcgtaaatagttttgtgtttttgggaatttgtgagatgtaatatgtcgttagttttttttaattttggtttgagtttaagagaaaggtagttgttttgaggttcgagattttttagtgatttagttttttaatttttagtattttgtgtatatgttttttttaattttattttttagatttgttagatgtaggtcgagtttttaaagatgagataattaagatgtaaaattttaaaattttttattaagtatttattagttgtagaggttttgttggggttttgagggagatgtgtgtggtagattgtaggttaagtaagtttttttttaaggttggtgttatgagaattatttaatgtcgttttttgttggggaaggatattttattttttttatggaagtttaacgggaaggatttatgggatagggtaggttgttttgttttttttttaggtagttattgtaattatatatgtttattaatttagtttattaaggtacgaagttataataaagtttggagttaaaattgtagatataaagagagtttttttatttggaatggtttcgatttttgaataaggagttttttgttgttgttttgttttgttttgttttgtttttgagatagagttttatttttttgtttaggtcggagtgaagtggtaagatttttgtttattgtagttttcgtttttcgggtttaagtaatttttttgttttagttttttgagtagttgggattataggcgtttgttattacgtttggttaatttttgtatttttagtagagatggggtttcgttatgatggttaggttggtttcgaatttttgtttttacgtgattcgtcggtttcggttttttaaaatgttgggattatagacgtgagttattaagtttatttataaggttatattttttaatgttttgttttttttttttttttttttttttttttttgtttttaaataattaaagatgtatagaaagttgtaaaattagtatcgagatgttttgtgtattttttacgtagtttttttagtggtaagtttttatatattatagtatattattagaataagtaattgatgtatatttttttaatgtattgtagtaggtggatttggtatttgagatttttaataattttttttcgtatattatgattaatagtataggtttatggtttttaaaggattgttttttgaaggaattggatggaattttgtttgtaaagagttgagaattattggagaggtaataaatggaaatgtttttgtagattgttattatagagagtagggttgatggatgttaaaggatatttagggatataagtttttagtagggaggagagtaaaaaggttagtgtggttggttattggagaagttatttggatagtttttaattagagatattttttgtatgaatggattttttaatgaaattaaattttgattgtggaaagtataattaatatgtaggaaatattagtatattttaggatttgagagtaaaggatgaagttttttttagagagatatattgtttttttttaggaagatgggtatagaagtgtaggaagttaattagacgtgttaaaatataaatttttggttgtttgtaatagagatataaatgttattggtttaaattaggtagaaaatgtttttttatttttggatttaagtatatgaggattttgttcgggttttatgatttagagggatttgttttattatttttttaatttataggataaaaagttcgagaagttaaagggatagatttatttatggaggttgtattttttttataagtattatagtttaggtatttggaatttttgaatttttggtattaatggtttttaagtttgtttttaagtttgtatgggtttttttttggggttatcgttttaggggttatgtttcgttgttgtcgtgtatgttttgagattttaaaatgtggttgtttttagagaaggatatgggtttggagattttagggatttgaatttttaggaaaagaaagtagggtagatgtaggtagaggatttagagttagttttttttatttagttatattttgttatggaatttaggggagttttagaattttaaattttagtttggttgttttagtttggattttttagaaaatagatttttagatagatttatttgtagaagttttattggggaataattttgggataaatatttttaaaagttgagagaaacgggatagggaaagggagtagttgaattgtaatgaagtcgtaaagagtattgagttgattttatgggttgtggaggtttttggtattggaaaagttttttaaatttggttaaattcggtcgggcgcggtgatttacgtttgtaattttagtattttgggaggtcgagtgggggaggattatttgaggttagtagtttaagattagtttagttaatatggtgaaatttcgtttttattaaaaatataaaaaattagtcgggtatggtggtatgcgtttgtaattttagttatttaggaggttgaggttggagaattatttgaatttaggaggcggaggttgtagtgagtagagattgtgttattgtattttagttcgggtaataagagcgaaagtttattttaaataaataaataaataaataaataaaaaggtggttaaatttgaagtaaggtaattaggattttgtatgtttttattttatttattagttattggatgtggttgtttttagggaggggaggtgtaattttgggtaagatagttttttttagttaagggtaatttttagagatagagttgttataattaatatttttggtagttggggaataagtgataatgttgaaggtaggatttgggtggtatataatagtatttgttatattagtttttaagattagtatgaaggtatatttattaagataaaagttggaatatgttttatttaataatttatttgtttgatttataataataaattatttttaatatatatttttttttttgatattagatagttgttttgagggatattcgagatttatatttaggaagtaagatagatattagtttggattgttgaatagatgttttgtgatttatttttagatatgatttagtggaaatgtagttgattttattttaaaattttttttgagaatatttttaggtttagttaatttattttggttttattataaggaaaggaattgagattagttgtattttgagaggttaagattttgatagggagtaggtgaaattaggttggaaaatagataagataaaggtaggtagatgtaagaggtatttaaaagtttagttgtgttttatttttgttttttacgaggaattttacggggagtttttatattattcggttattggttacggcggtgagttaaggttgttttattgaatgaaattattaattttttttttttttttgttaaaacgtaatttgtttttaagatttttttaatgtagagtgattttattgagtttagattatggattttttatttgataattttttaagagggatgagatagaatataatgtgagaaaataatattgttttaagatttgtaaatgttaataattgttgaagttttatggtaggtaaatagaggtattttttttatttttgtgtaagtttgaaaatttttataataaaaagtgttataaattgttttagtaggttatataattaataataaaggtaaaatttttgttggttttaatgagagagaatttggaaagtggagataagcggggttttggagtttttaaattattcgggttgtgttttgatttagcgagtttaaagtgggagggtaggagagttcgttttttaaaagatcgatagcgttatttatcggtaagagcgtttaatttttttgttaaggatgatattattatgttagggtgatagtagtaagttttattgttagttatttaagaagttaagataataagaaattatttaaaaaataaaatggtggtaggacgaggtggtttacgtttgtaattttagtattttgggaggtcgagaggggaggatcgtttgagtttaggagtttgagattagtttgggtaatatagtgaggtttaaatcgttattaaaaaaaaaaaaaaaaaaagagaaaaaaaaaagaaaggcgttaaaattaatttaaagatatataataatgaaaatattataaagtattattatttagttataaaaaagaaattatattttatttatttattttattttattttattttgtagatagagttttgttttgttatttaggttggagcgtagtggcgtaattttggtttattgtaacgttcgttttttcggtttaagggttttttttgttttagttttttgagtagttgggattataggtacgcgttattacgtttagttaatttttgtattttttttagtagagacggggttttattatgttggttaggcgggtttttaatttttgattttaggtgatttgttagtttcggttttttaaagtgttgggattataggtatgagttatcgcgtttagtagaaattatattttgatatatgttataatatggatgaatattgaaaaaattatgtaaaatgaaataagttagatataaaaggataaatattgtatgattttatttacgttagatatttaaaatggggaaatttggtttgttagtatagtaggaaaaaaaataaataaaagtaaaatataaaaattatagaggtgaaaagttaatttggttaggtgtcgtggtttatgtttgtaattttagtattttgagaggttgaggtaggagaattgtttgaggttaagagttcgagattaatttgggtaatatggtgagatatttatttttattatttttaaaaaaaaaaaaagaaaagaaaataagtcgattagaggttattaggggttgggcggaaaggagaatggggagttattgtttaatgggtaatgagtttttgtttggagtaatgaaaaaaatttggaaatagatagtggttgatagttgtataataacgttaaatgtaattaatgttaatgaattatatatttaaaatggttaggttgggtgtagtggtttaggtttgtaattttagtattttgggaggtcgaggtgggaggattatttgaggttaggagtttaagattagtttggttaatatggtgaaattttatttgtattaaaaatataaaaattagttaggtatagtggtaggtatttgtaattttagttatttaggagtttgaggtaggagaattgtttgaatttaggaggtggaggttgtagtgagtcgagatcgtgttattgtatttaagcgtgggtaatagaacgagatttcgttttgagaaaataaaataaaataaaataaaataaaatggttaaatgggaaattttattttatatatatttttatatatataatatatatatatatatatatatatatatatatatatatatatatattatatatatatataagtatgagttattatatttggttaaattgattttttatttttatgatttttttattttatttttatttatttttttttttgttgtgttgataaattagatttttttattttaaatatttgatgtaagtgaaattatgtaatatttgtttttttgtttttggtttattttattttgtataatttttttttaatatttatttatgttgtagtatgtattagaatgtaatttttcgtttatagttgaattatatatatgtttatttttattatagtaaaagaaattttaggttaggtatggtggtttatgtttataattttagtattttgggaggttaaggtaggtggattatttgagtttaggagtttgagattaatttgggtaatatggcgaaattttgtttgtattaaaaatataaaaattagtcgggcgtgttggtgtacgtatttattttagttatttgggaggttgaggtgggaggatagtttgagttagcgaagtttaggttgtagtgagttgtgattgtgttattgtattttagtttgggtgatagagttagattttgttttataataataataataatgattaattaatttaattaattatttttttaaattttttattttttgaggcgtagttttagttttgttgtttaggttggagtataatggtatgatttcggtttattataattttcgttttttaggtttaagtggttgttttgttttagtttttttagtagttggtattataggtatgtgttattatattcggttaatttttgtatttttagtagagatagggtttttttaggttggttaggttggtttcgaatttttgatttttggtgatttgtttatttcggttttttaaagtgttgggattataggtgtgagttattgtatttggttaaaaaaagaaatttgtaatgaaattgattttaaaataatttaaaagttaagaaaaaaattatattatataaatatgatataaatttaaaagaatgatataaaaaaaaatatataagagtaaaaaaggacgtaatgaaatatggaaattagtgaatggaaatagtgaaatgataaaataattaaataaattagtagtaagatatttgaaaggaaaagttgattgttaattaaaatacgttgttgggtgattaagaaattaaagttaagagaggtagatattttaggagtattttatttaggttatagtaaaatttagtttaggaataaaatattgtatgtatttatattagttttgttttaaataaaatttaaaatagtttaaatataatataatagaattaaaaattataattaaggttgagtttggtggtgtttgtttgtaattttatttattttggaggttgaggtaggaggattgtttgaggttaggagtttgagattgtttagtttggataatatagttagattttatttttaaaaaagtaataaaatgaattagttaggttgttggggtatatgtttatagttttagttatttttttagaaggttgaggttggaggattatttgagtttaggagtttgaagttgtagtgagttatgagtgagattttaaaatttttaagaaaaagaaagaaaaatacgaaggtaagtaaagagttagaaaaattagataaaattagtaagattagtataaatattatgttgtgttgggggtgggggtcgtaggtttggaattgagttttttagaagttaatttaaagagggaaatataattattatatggtttttagtgtttaaagttttagaagtagtgagatagttaggtgggaggggttttttggagaaatgttaattagtttgtttattgaggtggagttttaggaagtttgtgttttttgtagcggggagtagtttggtttttttttttagtgtgtggattttgggatttgaatggcgggtgggaagcgttttagtagggattttggtttagcgatagtttttgttttttcgttttttttttttttatttaataaaatttattttatttattatttagattgtttgcgagtttgaattttcgtggttgtgggataaagaattcgtttttagttgaattaaggaaaagtttcgtaatagtaatataattaattttttttttgagattaggaagtagtttttttttggttttttttgattagaaggggtgtgataaagtgaataacgttttaattatattattattataaatataagtttttataggatttatttattttttcggtgtttttgttatagttggtggtattatgtttcggtagaattagttagattagtgtagttttatgttgtgtgttcgtgttattggtttggtttaatttagggatgaattttagtgtatatgaaatagacggtatatatatttttttattaaattgatagaagaagtttttttttatttattttttgatatgtagagtatgattgtgagtttagtgttattatatatttgatgttatagttattttgaagttgttgattaaaagtaggttatggttgggcgtggtggtttatgtttgtaattttttagggaggttgaggtgggagaattatttgagtttaggagattagtttgggtaatatattagattttgtttttattaaagaaaattaagaaaataaaattaaaataggttataatagaatatttatggttagaatatatttgtttttatgtttttttgtagggaataatgattaaatagtttatgatttttgttttttgagtttcgtttttttagattttataaaggttatttttttttgtatttatattttttttttagttggcgtttagtattatggatttgatttttgtttttttaggtttagtttttatttatgtatatttttttttggttttttttgattggatttatttattttttaatttttttagtattatttatagtgttttttttagttagtgttttttatttattgtgtatagattttttataatttttattcgtaggtgattaatttttatgtaatgttttaggaaattttttattagttgtgtgattttaggtaaattatttaatttttttgagttatatttttattatttataaagtttataatgtttattttggaaggatgtttggaattaaagtaagttagaggttgggtgtagtggtttatatttgtaattttagtatttttggaggttaaggtggttagattatttgagattaggagttttagattagtttggttaatatggtgagattttcgttttttttaaaaatataaaaattaggttgggtacggtggtttatatttgtaattttaatattttgggaggttgaggtgggttgattatttgaagttaggagtttaagattagtttggttagtatggtgaaattttatttttattaaaaatataaaaattagttgggtatgatggcgggtgtttgtaattttagttatgtaggagtttgaggtaggagaatcgtttgaatttgggaggcgtatgttgtagtgagtcgagatcgtattattgtattttagattaggtgatagagcgagttttaaaaaaaaaaaaaaaaaaaaaattagtcgggggcgtatttttagttatttaggaggttaaggtaggagaattttttgaagttagtaggtggaggttgtagttagttaagatcgtgttattgtattttagtttgggggatagagtgatattttgttatttaaaaaataatataaaataaattataataataatggtaataatagtaaattgttattgagtttttatcgtgttagatacgatgttaagaatttcgtatataaatatttggttgagttattttaataagtttattatatgggaattttgattatttttattttatagataaggaagatgaggtttagagagtttagtgttgggtttattagttatagtagttataattatttaatgttttttaatgttatgagaaagttattattagtttgggagtttagtgggagggttaggaaagatttgaataatgagttgtttgtagatgaatgggtttttgtgtttgttttgtttttattataaatttagtattatataggtttttgtaaaagtataaagtataaagttgaaaagttttgaaaagtttttattattaaggaataatcgtcgaaataatattttattagaattttttttatgaatatattttttaaaaattattattagtagttttatggaatacgaatattttgtttaaaaaagagataagtttttatgtttatattattttattttttttgagtattatttttttttttgatttttatcgaaagggttgttttttatgttgttgttttagtttttttagtagtttaaaatatgtatttttagttttagtttaatttatgattttttttatatttatttaaagttataattttatttaatattaaaggttatttagtagttttagttttttttttgaattaaatatatttatttatttatttatttatttatttatttttggaattggagttttattttgttatttaggttggagtgtagtagtgcgattttagtttattgtaatttttgtttttggggtttaagtgattttcgtgttttagtttttcgagtagttaggattatagttgttcgttattacgtttagttaatttttatatttttagtagagatggggttttgttatattgattaggttggttttgaatttttgattttaagtgattcgttcgtttcggttttttaaagtgttgggattatagttatgagttattgcgtttggttattaaatatattttaattttttttttttttttattttttttattgtatttttttaggattttttgggttttgttaaaagtttttggaattggaatgtagtaaatgaatgttttatttaataggtagagaaagaggaggtgggtaaattatagaattaaagtgtagagtggtgaagagttttagttgtatgtagggtggggtggttgttagggttttggtgtttttagttattagttttgtaaatgtttatgagttttattagtggtgtttgtttagtagagagtaggagtaggggtgagggtgaggataagagatagatagagtttggaggggtagttagttgtataggaacgattttttgtgtaagttgtaggttttgtatttagttagtatttgagtagggtagaggtttgatgaattgatttataggatgggttggaggacgtagagtttgtgggtatgaggttagttaggagagtgttgttattatttaggtaggaggttatgaatatttttatatgagaaagaagggtataaataggaaataaatttaataattaaataaaagtattttttttatgtaggaaattcgttttgtgttaggttttgtagaattatttgtagagttatttttttttttggtaatttggtagtttttagtaaatataatgtattttggtttgttattagtgtaatttttgttttttagatataggtaaaatgttaaatttttaagaaggtttagaaggttttgtagtgttagtattagtatttttattttttggtttttttttgtggttatttttttgggttttgtagatgttttaggttttatttaaattttattggattaaggtttattttaatgattttattttaatttgatgatttttataaagattttattttttaattagattatattttgaggtattagggattaagattttagcgtattttttgggggtgggggatatatggttatattttgaatgattatagtttaaataggtttttgttaggtgaaaataataggtggaaaaattattgagtattttattttattttaaatttatgattttaaaatttttatagtggattggttttttagttgattttattttacgtggagtgttgtttaatttatattttttagttttttttatattgattttaatttttatatatttttttattttatttttgtataaatttgggtatggtttttttattgttttttagtgatgtggaaagtttttatgatgagtttattttgttttttttaatgtaagtaggatataataaatagtatgttaagttagtaaatttgatattaacgtttattttaaaaagtggttaattatgggttaggtatagtggattatatttgtaattttagtattttgggaggttgagatgggtagatggttttagtttaggagtttgagattagtttgggtaatatggtgaaattttgtttttatttaaaaaaaaaaaaaaaaaaattagttaggtatggtggtgtatttgtagttttagttatttgggaggttgaggtgggaggattgtttgagtttgggaggttgaggttgtattaagttaagatggtattattgtattttagtttggtaatatagtaagattttgttttaaattaataaataaataaataaaaaagtggttaatagaggaggtagtagttttgttattagttgttatgtggaattttaggatttagtttttggttttaaatattgttttttatttatagaaattaggattttttagaatgtaaggtttaggtgataattgattttatgttttagagaaggaaagaattaggataggatttgaatgttttgttgttgttatagagtaaggatgattttaagaatgtgaaggataggttgggtacgtggtttatgtttgtaattttagtattttgggaggttaagacggatagattatttgagtagaggggtttaagattagtttgggtaacgtggcgaaattttatttttataaaaaatataaaaagtagttgggtatggtgatgtatgtttgtagttttagttatgtgggaggttgaaatgggaggattatttgatgttgggaaggttaagattgtagtgagttgtgattgtgttattttaatttgggtaatagtgagattttgtcgtaaaaaagaaagaaaagaaagaaagagagagagagagaaggaaggaaggaaagaaggaaggaaggagggaaggaaggaaggaaagtaagttaaggatagtgtttaaaaagataaaggagttaattttaaagagtttttattgtttaagttgatagtcgggtatgaaagaaagaagatgggaggaggaatgataattatggttaattgaagtaaattgaatttgtggtaggttatgaaattacgataataatagataaaaatttatataaagggtataaaagatgattgtaatagagaagaattgagttttaaaattttattttaataaaaagggaattatttattttgttttttttattaattatgtgtttgtttataaagtaaagataggtgtttgtttttgtttgtgtaagtagaaaatttatagagaatgttgagaaagttaagtagttttgttatagtaggtagttagttaggtacgagtagagtaggagagggttttttattatatatatttattaggaatgttaggcgagtattaggtgatggttaggcggttattaattgtttttttaaaataataattggtagtagttggcgttagggataggtagattttaatagatagaaaaaatttgaaattggtgattagtagttttttgataagattttaggagttgggcgagtggatttaagtatgtttattaagaggtaaaattgtggagtttaattggtgtatgttttttttttacgaattttagattggtaagggaagaacgttttaagtgagtatgcgtataattttagtaaatatattgtgtatgtcgttttttttaagggttagtagattattgtatatatggatagtttagtttaagggaagaattaagggagaaggaatattaagattttcgaagtatgtaatgtataaaattttaagttaggtcgggtgtagtggtatatttgtaattttagtattttgggaggttaaggtgggtagattatttgagattaggagtttgagattagtttggttaatatggtgaaatttcgtttttattaaaaatataaaaattagttaggtttggtggtgtatatttgtaattttagttatttgggaggttgaggtaggagaatcgtttgaattcgggaggcggaggttgtagtgagttaagattgtattattgtattttagtttgggtgatagggagagattttattttaaaaaaaaaaaaaataaaaaataaataaaaaaagatttaagttaaaagattaaattatatatttgatttttaaagtcgtttatttggtttttttttaaatgtatttttttttttgttttaaagttttttaataaatttttatttttgttttaaaatttgtttcgttgttttttgttttatgttttttagttaaatttttttttttgaggaggtaagaattgaggttgttgtagatatttacggatttatcgttagtaatagttttgttgtaaatatgaatgttagtagaaataagaacgtttgatatgagatgatgttagaggtaataatgaaagagaagggagttttaatagtaggtattaagataataaattaattaaaaatattattaaaaagaagagttaattaagttaatttaattttttattttttagaatattgaatatttaaattgttttattagttataataaaatataaataagatatgtataagatttaatattgttaatagattaagttagtatattataatgagagaaaaatttattatgtaataatggttaagagattattgaagtgtgttatattagggggagaaaatatgttgtgagatttttgtttgtttttttgtttttgttttttgatacgaagtttcgttttgttatttaggttggagtgtaatggagtgatttcggtttattgtaattttcgttttttgggtttaagcgatttttatgttttaatttttcgattagttgggattataggtatgtgttattacgttcggttaatttttgtttttttagtagagatagggttttgttatgttggtcggattggttttgaatttttgattttaggtgatttattttttttagtttattaaagtgttgggattataggtgtgagttatcgtgtttggttcgtaaaattttaaaatttatgtaaaagatgtgtatttaattaaaagtagttatattttttagtgagatataattttatatttattaggttggttatagtaaaaagagagataataagtgttggtaagggtgtggaaaaattggtatttttatgtatagttgttggatagtgaaatggtatagtattttggaaaatagtttgattatttttttaaaggttgaatatggagttattgtatgatttagtaattttatttttaggtttatagtttagaaaaatgaaaatttatgtttatataagaatttgtttataaatgtttatagtagtattatttataatagttaaataataacgataataataataataataaaaaatggaaatggtttaaatgttttttaacggatgaatggaaaataaaatgtgatatatatagttatacgttagaataaaaatgaatttgaaaataaaaagaaataaagtattgatatgtgttataatatggatgaattttgaatatattgtgttaaatgaaagaagttagttaaaacgatattatgttgtattattttatttatatgaaatgtatagaataggtaagtttttagagataaaaagtagatgagtggttgtttagggttggggtggagtaggggagggttaggagattgggagtgattgtttatgggtttgggtttttttttggggttgatgaaaatgttttgaaattgattatggtgttggttttgtaattttatgagtatattaaaaattattttttggttttgtatatttatttatttttattttattttattattatttatttatttatttatttatttattttgagatagagttttttttttgtcgtttaggttggagtgtaatggtataattttggtttatcgtaatttttcgttttttggttttaagtaatttttttgttttagttttttaagtagttgggattataggtatgtattattacgttcggttaattttgtatttttagtagagatggggtttttgtatgttggttagattggttttgaatttttaattttaggtgattcgtttgttttagttttttaaagtgttgggattataggagtgagttattacgttcggttttattttattattttattaatgattttttaattttgtgtgtacgttgtaggtatatatgtttatggggtatatgagatattttggtgtaggtatgtagtgtgttataattatattatggaaaattgggtatttatttttttaagtatttattttttgtgttataaataatgtaattatatttttgtagttatttttaaatgtataattaagttattattagttgggcgtagtggtttatgtttatatttttaatattttgagaggtcgaggcgggcggattatttgaggttcggagtttgagattagtttggttaatatggtgaaattttattattttaaaaaatataaaaattagttaggggtgttggtgtatgtttgtaattttagttattcgggaggttgaggtaggagaattattggagtttaggaggtggaggttgtagtaagttgagaaggtgttattatattttagtttgggtaatagagggagattttattcgaaaaaaaagaaaaaaaaagttattattgattgtagtttttttgttgtgttattaaatattaggttttatttatgttttttaattattttttttgttttattaattatttttacgtgttttttatagttttattttttttagtttttggtaattatttttttattgtttttgtttatgagtttaattgttttgattttagattttataaataagtgagaatatgtgatgtttgtttttttatgtttggtttattttatttaatataatgatttttaattttatttatattgttgtaaatgataagatattattttttttatggttgaatagtattttattatgtatatgtatattttttttatttatttatttgttgatggatattttagttgtttttaaattttggttattatgaatagtgttgtagtaaattatagttattattttttattggtttattatttagtttttttattttaagataggagtagtttatttattattattaaattattatattattttgtgtttttttgtatatttgttattattagtgagttttgtaatgagatttatttttatttattaatattttttttttttagattaaagagtttattttagtattttttgttagataggtttggtgttgatgaaattttttagtttttgtttgtttggaaaagtttttattttttttttatgtttgaaggatatttttattggatatattattgtagggtaaaagttttttttttttagtatttgaaatatgttatgttattgttttttggtttgtaaggtttttattgaaaaatttgttgttagatttattgacgttttgggagtttgattattaaatgttttgaggtagtttttgagtttaatttgtttggtattttataatttttttttatttgaatgttgatatttttttataggtttgggaaattttgttatttttttgaataaattttttatttttatgttttttgtattttttttttaaagttaataatttttagatttgtttttttgaggttgttttttagatttcgtaggtatgttttattgttttttattatttttttttttgttttttttgattttgtatttttaaggagtttgtttttaggtttattaatttttttgtttgattaattttataatttagagattttgttttttttgaaagattaaaataaataaaattttaaaaaggttgggtatagtgggttatatttgaaatttaagtattttgaaaggttaaggtaggcggattaattgagattaggagttcgaaattagtttggttaatataataaaattttatttttattaaaaatataaaaattagttaggcgtggtggtgggtatttgtaattttagttattcgggaggcggaggtaggagaatttttcgaatttaggagacggaggttgtagtgaattgaaattgtgttattgtattttagtttgggtaatagagtaagattttgttttttttataaaaaaaaaaagaaagaaagaaaaggaaaaaggaaaaagaaaaaaaatttttaaaaaaatttttaaaagagtcgtatattttttagtatgtttattgtattttttaattattgaatttttgtttgattttttttaattattttattttttttgttaaatttatttgatagaattttgaattttttttttatgttattttaattttttttttttggagatggagttttattttgttatttaagttggagtgcggtagcgtgatttcggtttattgtaatttttgttttttgggtttaagcgatttttttgttttagttttttgagtagttgggattgtaggtacgtgttattacgtttagttaattttttgtatttttagtagaaatggggttttattatgttagttaggatggtttcgatttcgatttcgcgattcgttttttttagttttttaaagtgttgggattttaggtatgagttatcgtattcggtttttgaattttttttagtttttttaaaatatttattttgaatgatttatttgaaagattatatatttttttttttttaggattggtttttgatagtttatttagtttatttgatgaggttatgatggtattgatgtttataggcgtttgtcggtatttgggtattgaagagttaggtatttattgtagtttttatagttttgggtttgtttgtgtttgttttttttgggaaatttaataatgttgtggttttgtagatttttagaagtattgttttggtggttttggataagagttggaagaattttttggattattaggtatagatttttgttttttttgtttatttttttttaaatatatagttttttttttttttgttgagttatttggagttgggggtgtggtgatataagtatttttgtggtcgttattgggattgtattgggttagatttgaagttagtatagtattgggtttttgttagggttttttttttagggtaataagtttttttaggttaagagtttttttagagatgttgtttgggagttagggattggagttaaaaattttggtaatttatttgatgttttgttttattgtggttaagcgggcgttgatattataatataaagttttttttatttattttttttttttttttaggtagaggagtttttttttatggtaattattattattagtttatagtaattttgttagtttattattaatgtttatttaaagtttaaaggtggtcggttgtggtggtttacgtttgtaattttagtattttgggaggtcgaggtaggtggattatttgaggttaggaggttaagattagtttgattaatatggtgaaatattgtttttattaaaaatataaaaattagttaggtgtggtggtgggtgtttgtaagtttagttttttgggaggttgaggtaggagaattttttgaatttaggagacggaggttatagtgagtttagatggtataattgtattttagttagggtgatagtaagatttcgtttcgaaaaaataaaaataaaaattaaagtttaagaatttttttattagtttgtggtgaatgttgttaagtttgggatttattttttagggtagtaggtttttttttggatttgttatgagttagaggggtaggtttaggatagaatttatatttagatttggggattttaagagattgtttgttgttttgttttattatggttgagttggtgtttaaggtataagataaagttttttttatttttttttttgttttttttaaattgtaggagttttttattatagttattatagttgggaatgtgttgggttattgttgaagatagtatgttttagagttttatttaaggtttatagtgtattatttggttattgttgttagttatgtagggtttaggggttttttagttagtaggtgatgaattttgtaagtattgggtttttttttttaaggtagtagttttttttttggtttaggtatttaaaaatgatatttgggagttgggtttggaatgggggttttatgatttggtttagtgttttattttattgtggttgagttggtatttaagatgtaagattaagttttttttattcgttgtttatttttttttaagtagagggaaggagttattttcgttgttaggagttgtattgtttgggattggagaaggggtggtataagtttttttttagttatatcggttggtgtttatttaggttaagtgtaattttagtttattggttgtaagtttagtcgagtattaggagttgtttaggaattgtagtttttgggttttagattgttttttttttttttttttttgtggaaatatggtttttttatgttgtttaggttggttttagatttttgggtttaagtgttttttttgttttagtttttttaagtgttgggattataggtgtgagttatcgtatttagtttagattgttttttaagtttatttaggatattagagtattttggtttatggtggtgaggtttgtagagaaatttaagttttaattattgggataggtgatttttttttggttagggttggtttagatgtttttttttatatgtaggtgtcggtcgattttagtatgattttgtttttcgttatgatagtgtagtagtgagtttaatataaagttttttattttatgttttttttttttaaaatgtaaagattttttttttacgttgtagggatattgttagggaggacggaaggggcgttataatttaagattgttttttttgttttttttaatgttttttttagtgatatgaagttaaatttagttattgtgattgtttatttgatttttggtttttgtgatgatgtttttttgtgtgtagatagttgttaaaagttagtgttttaggttgggtatagtggtttatgtttgtaattttagtattttaggaggttgaggtgggaggattatttgaggttaggagtttaagattagtttgagtaatatagtgggattttatttttataaaaatttaaaaattatttaggtgtagtggtgtaggtttgttgttttagttatttggaaggttgaggtgggaggattttttgggtttaggaggttgaggttgtagtgagttttgatggtgttattttattttagtttgggtgatagaggaagattttgtttttaaaaaataaaaataaaataataataataattgtattcgtaggtcgggtgtagtggtttatatttgtaattttagtagtttgggaggttaaggtgggtggatgatttgtggttaggagtttaaaattagtttgattaatatggtgaaattttatttttattaaaaataaaaaattagtcgggtatggtagtgtatatttgtaatttttgttatttgggaggttgaggtaggagaattgtttgaattcggaaggtagaggttgtagtgagtagatatcgcgttattgtattatagtttgggtaataagagcgaaaatttattttaaaaaaaaaaacgtatttgttttttagggggttttagatatttaagagaattttatgtattaaatgtaagattttttttttttttttaagatggagttttgtttttgttatttaggttggagtgtaatggcgcgatttcggtttattgtaatttttgttttttgggtttaagcgattttgttgttttagttttttgagtagttgggattataggcgtttgttattatgtttagttaatttgtatatttttagtagagatagggttttattatgttggttagtttgttttcgaatttttgattttaggtgatttattcgtttcggttttttaaagtgttgggattataggtatgagttattgtgtttagttaaatgaaagattttaattaaatgtttaaatgagtttaagtttaaaattaatatttaggtcgggcgtagtggtttacgtttgtaattttagtattttgggaggttgaggtgggtggattataaggttaggagatcgagattattttggttaatacggtgaaattttatttttattaaaaatatagaaaaattagttaagcgtggtggtgggtatttgtagttttagttatttaggaggttgaggtaggagaatggcgtgaatttgggaggtagaggttgtagtgagtcgatattacgttattgtattttagtttgggtgatagagaagatttcgttttaaaaaaataaataaataaataaataaataaataaataaataaataaataaaattaataatgtgttttaattagtttggattattaaatttataaatgtttatgtattagttgtgtatatagtgtataaatagaagaatatttaatgtttaaatgttatttgtttaataaatttataagagaaataaaattatattaagtagaaatattttaatgatatttagatattgagagggtgttttaggaaaagagaggggtatttgaatttgaaggttggtgatagatgtttaaggggttattaatatattagatagattttatttttttagatttattatttttgtatttattaattatgaatagagttagtttttttgaatttattatatgaaaatgttatagtggatagagagatttaagagaagtgagttttgattgggtgagttaagagggattatggttttgagtagttagggagtgatttaagtacgggatttagagaaaggagggatagaggaagaggtgttaaagaaataattttttggtcgggcggggtggtttacgcgtgtaattttagtattttgggaggttgaggcgggcggattacgaggttaggagattagattattttggttaatatggggaaatttcgtttttattgaaaaatataaaaattagttggggatggtggtatatgtttgtaattttagttattcgggaggttgaggtaggggaatcgtttgaattagggagtcggaggttgtggtaagtagagattacgttattgtattttagtttggtaatagagcgagatttcgttttaagaaaaaaaaaaaaaaaaagaaagaaagaaagagaaaaaaaaaatatttgttgtattagttataattgttattttgaggttaagaagaattaaatggttttaaaattattttataatttgttgttattatttttttatagtggggtttgtttagttagagaattaaatattaatttattttaggttggttatggtggtttatatttgtaattttagtattttggaaggtcgaggtaggaggattatttgaggttaggagtttaagattaatttgggtaataagcgagatttttatttttataaataaataaataaataaaagagtaagtacgttatatatattatagaattttaagaattgaagtaattttgtaatatttagtttatggtaaatatataaaggaaattattattattattatttaatagtgtgtgtgtaagtgaaaaatgttttttttattgataaatggttaagtgaatgttgtttgtttgagggatgaaatatttaaatgagaagttaatttaatttttttttttgattttagagttatttttttaagtgtaatttttagtgtaaagtattatattaatttattaatcgattgtgatgttaattatagtttttgtattagattagtttttttttgtgggacgaagaattattttgtggttttgttaggattgttttattgggataacgtattgtattaggatttattttttacgatggtttagggttttttagtttttaaggtattttattattattttatttaaattttttaataattttgtgagggaggttggatatttgtttttattttatgttatagatgagaaaacgaaggtttatagaggttaatgatttgtttaaggtgatttggtatagaaagttgtgtggtagaaggggaatttttgttttttaatttttggataagcgtttttttaggataggagaaatgaatgatttttgttattttagttattatttttattaattaattattaataaaaatgtaaaaattagtatgttagtagtagtttttgttgtaaatattaggattttttttatattatagattattgaagatattttttttttttttgttgtagttgttgttgtttggtttttgggtgttgtttttgttgttgttgttgtttttttgagatggagttttttttttgttatttaggttggagtgtaatggtgtaattttagtttattgtaatttttattttttaggtttaagcgatttttttattttagtttttcgagtagttgggattataggcgtttattattatatttggttaattttttatttttagtagagatagggtagtattatgttggttaggttggttttgaatttttaattttaggtgatttattttttttagttttttaaagtgttgggattataggtgtaagtcgttttttttttttttttttttttttttttttttagttttgttttgttatttaggttagagtgtagtggaatgattatggtttattgtagttttaattttttaggttcgggtgatttttttattttagttttttaagtagttggtattataggtataatattatgttaagttaatattttattttttttaaagtttatttttgtttttatgatgatgattttttttttgagatagagttttattttgttgtttaggttggagtgtagtggtataattttagtttattgtaatttttattttttaagtttaagtaatttttatattttagttttttttttagttgggattataggcgtgtaatattatgtttggttaatttttgtatttttagtagagatggggttttattatattggttaggttggtttttatttgttttggttttttaaagtgttgggattataggtgtgagttattatgttcggtttatttttaattttttttttaagtgtttaagttaattttttaattattatttgtagagatgaggtttttttatgttgtttaggttggtttagaatttttgggtttaagtaatttttttgttttagtttttaaagtgttgaaattatagatatgagttattatgtttagttttattattttttaagtaataattaacgttaatttaaagattattttgaggggattggttatatttttttgggattttttattgttaaagtttattttttttgagttattagtattaagtattagatgaattttattgttttggtttagtgttgtttgtgtgtgagttttagttttttattttttttgggttttagtgttttttttgtgtagtatgtttcgtagtgtttatttaatggggttgttgtgaggatttgttggaagggtgtgtgtgtaagttttttgtttaggatttggtttatatgtaaatataataaaagttcgttgttatttttgttaattgtatattgtatttgaatattttttggatagataatgagaaaaatgaggtttgagttattatttttgttatttgtaattttgtgtgatttgtttaatttttttaaattttagtttttttatttgtaaaaatttttttttttttttgagacggagtttcgttttgttatttaggttggagtgtagtggcgcgatttcggtttattataatttttaattttcgggtttaagcgattttttagttttagttttttaagtagttggtattataggtattatgtttggttaatttttgtgtttttagtagagatgaggttttattatgttttttatgttggattaggttgtttcgaattttttaggtgattcgtttgtttcgtttttttaaagtgttgggattataggtgtgagttatcgtgtttggtcgtaaaaattttataatgttttttttatagagaataatgaaggttaaatgatgaaacgtatagagtattttaatgttgagaagggttttatgaggttgttgaaaaatgttagtgaggttttgggagggttatagtcggagtgtagattagattttgggtgtagtcgtatggtttaggaattgagtggaagaagagagatgatgagagagggggagggatagagagagaggattagttattttttcgtgtttgttgagtgtttgttttggtttagattttgttttttgtgttgggggtgtagtagtgaattaaagagataaagtttttgttttcgtggtgtttatgttttagtgagtttgtggaatagagtaggggattgttgatattaaatttaaatgtgcgaataggaatgattatgtagaagaggttattaggaagagggatagagagaaatgagattttaggtttgatagaatgattttgggttggtggaagaggtaggtgttgaaaataggtatggaattttttgttttagggtagggagaaattaagagagtttaagttgggaaaagaattaggtgaggaggttgaggtgttgacgaagggagtgtgtttggtgatgggaaaggtgggttttgaggaaggtgttttaggaaggattttttagtgtaggatggagttttatggtagacgttgggatcgggtattttttttagaaatgtttatttgttatttaggtaggtaggtaggtagttttttattttttgagttttggtgttttttttatttttttttttttttttataagttgtttaatttttagggatttgattggatggagagtatatatatttggattattgtaggtatggtatagggaagagagaatttagatttaaattatttttaatttatatttgttgattttttcgtgtttttgtagtttgatttttcgttgtcgttattttaatttttgtgtgaggatgttgagtttttgggaaaatcgaagggagggtaggagagataatattgtgattaaaggttgagattgtgttattatttgggaatgaaagtattaaatgttattttaggtgggattgttggttttaaggtttttttttttttttttttttttttttttttttttttttttatcgaggtttgttatttatttagtaattttttaaagtttgtggttttgtgggatataatgtgttaaatgatgtttgtaagggaggaggtcgatgtatttttatttttaagaagtttgatttttcggggaagaaaagataagtgaagcgtagatattgcgatttttggttttttgtttttgtgagttgtaaggaattttgtttatttggttttggagtcgttttttgggattttatttttgttttttgttgtaggtgttattttaattagttttgttgtttttttttttttttttagattttagtataattttggaatagtttttttatttggtcggggtgagattgaggttttatttttaagtatttgggtattgattttttgtgaaggatggggatagtaagatagcgtttgtaggggtttttagagggtcgtggggatggttagaaaataggaatgaatagatttattttagtttatgtttagatttattttagtttatgtttagaaataaagaaattaaggagaagtaaattttataagtgtttttattttattggagatgagtaggggaggtattgaaaagtggggatagtgttggaaatatgttgatagggtttggattgagtttatatagtaaggggcgggagtaggattttaatttttaatgttgggtttttttttatcgtgttttagttttattgtaatttagggtttggaggattagggaagttagttgggatgttttaagaagagttaggagggcggaggattttaggaggaaatgggttattgatatttgggtatagatgaatatttttttagttgttttttggatatcgattaatatttttttagttgttttttggatatcgattaatatttttttagttgttttttggatatcgattaatatttttttagttggtatttgggggttgattattgatattttagatttttttagggtgtggtatgggtttcgttttttaattagttttagggtttttatttttttaggatatattgggatttagggtattttaggggtgattaggtagaattttgtggatgagagattagggagggcgttgggaaaggatttttttttcggtttttagtgaattagaacggggtagtcgtttggatttcgagttttggtggaggagtgaagttttgggtgagaggtttgtggtatcgggagaagattttttaggtaaagggttattgttcggagcgagggtcgtagtattggagaggtaagagagttttttaggtagcgttttttttaggcggtttttagtcgtagtagttattatttgttaaggatttttagggggttaggaatttatggtaggtagtttttacgatggaggttatttttgtattgtagaattttttgtaggtgggaagttatttgatgtaggtacgttgagttttagaggaatttttgttaagttattagatttagggtttagagcgggttgcggatgtttagagttagaggggttagtggaggaaggttgttcgagttgaggtaagttggtttttaagttttgggaaatttttttttttataatatcgatgtttcgggtaaagaggtttgagggaaagggaagataaagtaattagtggtttttagttttcgagtttttagttttttttgttttttttatgtttattttttttttttttttagggatttaaatgtgtatttttttgtttttatttttttttttaatttttgttttttgggggatttttagttttttttgtttaagggtattacggtttttatatttgggagatgaagatagattaggagtaggtttagaggagcgtagttttttgttacgcggttttgtattttgtttagtattcgattttttttagttttaagatagttagttttttattttggtagtggggtgggggatagtagaaataggttgggttagtggttgtgaagataataaatttttatattttatttttatttttaatgtggtttgtggtaataggtgttatttgaatgaatgttttagaggaagttgggtgtttttcgttttggtttttttttttgatttttttgtttttttttggtttaggtgttttggtttatagtttatttttggttgttagtttttttagttttgtttttttatatataaggatttttattttggggttttatttttttaattgttttttttagtaatagaaatatttgtttttttttgggagttggattgtttttttttagtattttttttttatgtatttttatattttttttattttggttttaatttgtaggaggttttggggtgtagaagtggttttatttgaggagttgtttttatatgagattttggatttagttagggaaatggatttggatgttatttttatgagatattgattaatttttgttgttgtagtgataaattattatgaatcgaatggtttataataatatggatttattattttatagttttggagattagaagtttaaaataggttttagtggattaaaataaaggtgttagtagggttgtgattttttttgggggttttaggggaaaatttttttttttgtttttttattttttagaggtattttgtgttttttggtttatggttttttttttttatttttaaagttaaaattagttattttttatattgtattatttagatttttttttttgttttttatgtttatattaagggatttggtgattatattggatttatttgaataatttatgataatttttgtgaagttagtcgaatagtaattttaattttatttggaattttaatttttttttgttatgtaatttaatttttacgttttagggattaggatgtggatatttttgatggtgttggggttgaagatattattttgtttgttattggtggttagatgtgttatagagtataagaaattttgggagaaagtggttatttttaagtaatagtagaggagagtttttaaatgttgttgttaaatggttaggatttgatttttgttgaagttgggcgatgagaatgtagagatttattaatagtttgttggtttttaaatatgtttgtaaattttattataaaaatgtaatggttttgttttttttatggttttcgggaggttttaggagtaggtttttttggttgtttaaggtttaaatatgagttgttggttgattttattgttgtgttttttttatttgtttttgttggtttaattattggaggagtgaagagtttttttttagaattggtagtggatggagtttagaggtttttttggatgatatgtatgagttttatataagtttttaatttggagtatagtaggagattcgaggaaatattatattagagagttttttttttttgtaatttttatttatgaagtatttgaggatttcgatttttgttattggttgtagattaggggttagatgttggattaagggtgatttaatttttttttggttaatgtaatatatttttgttgattttagatttggagttttaatagttttaaatttaggattagatagtattattttgataggagggaatgggttaagtgttatagtaggggtgaatttttttgtagttaagtagaggttttgagaggtggtttggggtggggggtggggtttttatagggataagtataatttattttgttttttttgggatgcgggaatttcgttcgttttagtttttttttgtttgttttaggatttaagtcgtatggattttattatatattttatttttttttttttttttagtggaagcgattttttttttttattggggtattttgtttttttagtttttatttgagagttatgttgtttatatttttattttggattttagtagagtagggagtgtgaagatggagagattattggtagttttgttttgttataggttgggttttttgatttaggttagtgagttattttgtttggttgtattttttgtttcgtttttatttttttagttttttattttttttatttttagttttaggaataacgtttaattggttttttatttagttgataggaatttggttggagttgttgtgttttagtttttttaagtttttaggtgttttagaaatttaggaaatcgagatttatgatttttagagaggatggtatttagaaggtgaggaatgttaatggtggaagaaaaggagtttgggtggggaggggaggggaggggagggagagaaaatattgagggttttaaataaggggaagggggattttacggtgaatgaggaatgggaagagaatggattttttggagtaatgagagaggagggaaatggcggaaggatttgggaggttaggtaatttttgtttttagtttaataaatatttattgttttttttttttgtgggaggagttggaaggtagaagagaaatatagttcgtttttgaaggaaaatgagggatatagagatttttagaggcgtaggaagagtattatttagatttttagaggagatttaggattttaagaaggtaaaaagtttgtatttagtttttatagtttattgagttatttgtttaggatttagggatagtagggagtttgttttaatttttgagggtgttttagtgttttttttatttagggaattatttgggtattgagggaaatggttataggaaggggttgagataagggttttgagaggtaatgggtgtgttggggacggtgatttaggagggcgtggtgagttttgtaatggagggtggggtggaattgggagcgaaagtttagtggtatattgggtgggttgattagatgtcgaagagaggttagtgaaaagtggttattgtttttagatgatggtttgattttgttttatttggtaaaggggaagaggaaggtataatttttttaggcgttagaggtgttttgagagtattttaggggttttttagttgagaaggtgatgggggtgttatttaatggattattttaatatagtagagggaattgtaaggggtggtgatttggttgaggggtattgtggtggaatgggaatttaaatagtaggagagaattaagagaggagttttgaatttattattttgagaagaggaaggaggaaggggtgataagagagagtttgtaattttagggtagtagagaaagtagaattatttttttgggaaggagggaaattgagttaattttatgtttgggtattggtttttttttatatgggatatagtgtatgtgtttgtttgtgtttaaggtatgtatatatataatagttgatttatggattgtcgagtaattttttttggggtaggaaaattttagggttagttagttggggttttagaggttttatttgggttaggatatttcggatggagcggtaggggatttttttagtattgttggagttatagggtttggtattagcggagggattaggatggggagagttatcggggtttttagttagtgttaaggaggagatagatatgtaagggtgattagaagagttggatttgttgttataaggttgaaggatgattttgttattcgattgggaattggagttgttgttgaaggagtcggtgtttggtggggagtaggggttttgggaagtattgtcgtagggatggtagggtgaatcggagttgttggaaatgttagaattgttggggattcgagaattggagggagagtagggttttttggagttcgtggagtcgtttttatagagttggattttattagtttttattggttggaacgtaatggtcgaggaagttgtcgattggttggggatgatggggttgttggagaagtatttgtttttagagatggggggtttagttgtaaaggaagggatttttggagagttttttatagggttttttttggtgaagtagtttataggatagattttatttttattgtaggttatgtttggaattagataattgttagaggagttatttattatttcgtagttattataggatttgtttatagaggtgattgggggatagggtttgtttggaaggttattattgttataggggggattttgaattattttaggggtattagaatcgtgttggtttattattattattataggtttttgattttttgatatagagtgggagttggggatgtaggggttagagtgcgagacgatgggttttttattgtagggagagtcggggatgttcgaattatagggacgttggttggagttgacgttttggttattgttggatattttagaggtttgggaagaggaagagttttgtttaggttgggaagggtttagtatttcgcggtaagagttgttattggttggtagagtagagttattttttatttggaagttgttgttgttgaattgaaagttgttgttgttgttcgaatgagagttgttgtttttcgagtgagagtcgttgtttttcgagtgagagttgttgttttttagttgggaggaatcggatgtattttgtagattagagttagattcggaggagtagttgatttgggaatatttcgtttttggtttaaaagattttgtagaattattttgggtaatgttggattcgttggagttattattggagttattattagagtttttggtattggaaatggagttgttagaattgttggagttattgtagttattgaagtcgttggagttattttttttagtgaggtaggggtcgttaggggaggtgatacgcgtggggtttttataggggtttgagaaggtgttaatgtttttagttaaggtttttgtggaggaaagtagtggttagtaagggttaaagaggtttggtttttttttttatttttttgttttattttagtaatcggtttttcgggttttttttaagtagagcgtagggagagtttagggatggagaaaggaggaagaattggttattgtttttaaaggatattgaggtggtcgaataaaggtatttttttgtttgggaagggtgggtaaatattaattagaaaaatagaaaattacgtgttaaagtgagtgattttaaaggaatatattgaatataagagggggttgggtatagtggtttacgtcggtaattttagtattttgggaggttgaggtgggaggattgtatgcgttttagagtttaagattagtttgggtaatatagattttatttgtattttgttttttaattaaaattttttttaaaaagaagagggaatggagaaggggtaggaataaataggtttaaaagaaaggattttgaagagatagagaattggggaaattgaggttttgaggagtttaggcgtaaatttttaggggaaaaattttgggttagatagtgggattagagggaagaagataaaaggtaaaataatggagggttgagaagtggagatatatatagaaggagatattggaaaaagataaagttgggggtagaggggttgaaataaaggaaagggtattcgaggattaagatttggttattagttttttcgtgagagtttaggttggggttaggaatggaaattttattttttattttagtattggttatgttagtaaagttgggtgggggttaggatgtggggttattatttgttgttttagaatttgttggtattagtgtgttaggatatcgtattttgagttagttttgttttcgttggtttagtttagggaattaggacgaaattttacgaattttcgaggtttttggttataattagtttttttttttgagtatatttgtttttgtttagttttttatttgatttttgttgttttgattttttttagggatgtggagttatatttttttttatttttttttttttttgtttaaaattttaggtttaatttattttatggtttttttatgatttttttatttgcgttttttttgttttttttagtttttttaggttttacgtgttataaatagagttatatattagtaagttattgaatttttttgagttttagtttatatatttagaggggttaaattttttttgtttttttatagtattattatgaagaaaattaaatgagattatttatttggaagttttttttttttttttttttttttttttttttttgtgagatggagttttttgttgtttaggttaaagtgtaataatacggttttagtttattgtaatttttgtttttttggtgtaagcgatttttttgttttagttttttaagtagttgggattataggtgttcgttattatatttagttaattttttgtatttttagtagagagggggttttattattttggttaggttggttttgaatttttgattttaggcgatttatttgttttggttttttgaagtgttgggattataggtataagttattatgtgcggttagatgttttagaaagtgtaaagtattatatattatgaattattattgttatttattttgatttttttattaataattagattgttattttttgtgatgtttttgttttttttttagaaagaaattttttgtatgtatttttacgtcgaattttagttgtgttaattttttttagttttttgtacgaatttattatgtattgtttttttttttcgttatttttttagatattaattatttattagattatgggaaggtcgtagaaattttttaagggttataagtattcggtggttaataatataggtttaggggttgtttggtttggggttgaaattttggttttgttgttttttaatgtatgattttgagttagttttttaattttttcgagttttagtgtttttatttgtagagtggaaatagtaaatttttttttatatcgtttttgtaatgattaaaagtgttaatataggtcgggtgtggtggtttatgtttgtaattttagtattttgggaggtcgaggcgagcggattatttgagttaggagtttaagattagtttgattaaaatggtaaaattttgtttttattaaaaatataaaaaaaagaaaattagttaggtgtggtgatgggtatttgttgttttagttattttagaggttgaggtatgagagtcgtttgaatttgagaggtggaagttgtagtgagtcgagattacgttattgtattttagttttggagatagagtgggattttattttataaaaaaaataaaaataaaagttttaatatataatttaaatgtgtttaaaatagagtttagtatataaaaaggttttaaaaatgatattattattattaaatgtttaattattattttgtagtgtttttataataaaaattattattattatttatataaatttttagaatttttaaagtatatattatatatattatttaatttgagatatatagattagaggtaggtgttattaattttattttagaattttagaaattggggtttaggaagtttaagaaatttatttgaggcgattatatagtgaggagtaatttttagatttaaaaggtagattttagagtttttgttcgtttttttcgttgggttttttttcggagtttttttttcgttttttttttgtttttagggtttttagttttttatttggtaggaggagattagttagtagtagtgttattatttcgtgtttatttatacgttttatttagggtgttcgagacgagtttatttcgggttgtacggttttttgattgatggtagttcgaggatatttgggttttttatgttagagttggatattttttgggtaggagttattgtggggagaggaggagaggtggagggggtgggtgtttcgggggaagttggtgtggtcgggaggagcgtggtaattagttcggtgtatttgtttatttagtagtagtagtggttgtagtgtggggtatttatggttacggggttttaacgattttgttatttgataggtttggtttcggttttttattgtttaattcggaattaggcgttttgttttacggttatttattttggggcggttatttttgttacgggatttagttgtttggttttttaatttttttgtttatcgtggtttggtttgtttttttatttgttttttattcgtagtcgtgggtgttttagtttttttttttatatttgggtgttcgttttagttttatttatttaattttaatgaggttttatttatagtttttgatttgttttttttttaggattttattattttatttttattttttttttttaaatatgagttttgtttttattttttaggtttttttttttattattttttaagtattaggttagttatatatttattacgtgttttattatttggggaatttttttttttttagaaatggggtattatatttttaaaattaattttttgatttgtcgtttttgggggtttttggggacggtatggtggcgggggtgggggggggtgttgggagttagggtttagttaggggaggggtttgggttgatgatttttgttaaagttgggttttggttatttataggttatttatagtttttttttatggttggtaatttagattttaagggtgagtaagaggttaagaaggttaattgggaaggtggtggtttcgtagtttatttgttggttttgggttggatgagcgagtaggaagtagtagttagttttgggtaggtcgaggagggttaggtaggttttcgggtttttaaaggatgaaaggaggttaggagaatcggagttttgttatttgttgagagggtggtggttttttttttattgcgttggttttttttttgttttggtttttgtttcgttttagttaattaattgtttattagtattgcgggagtattagtatcggagggaggtgtttgtaagtttagtaagttgttttttttttttttaggttttagatatttttgttttttttatttaaatttattttttaaattttatttttttataaaggtagttttgtttttgggttttttgggttggttttttttattttttttattttttgatcgttttttaagtttagattagtaggaggatggaaatgttttttgtttgtgttgttcgatacggtagttattggttatatggagtaagtttaattattaaagatttggagttttaattttaattaattgtaatgatgtggttggttacgtgtagttagtggttgttatttagttttgtttttgatttgttagtgatatttagaatgggagtgggaggaaagaggggttgagggagttgtggagagaggaagggataggatagggttttttgaagggggttaatgttttgggaaaaataaataaataaaaaatattggttttagaatgaagatgacgtgggtttaagttttagttaattttttggttttgggcggttttttaaatttttttgaatttttatttttttatttgtgaaatgggggtattttaaataatatttatttcgtaaggtttttgtgaatattaaatgggaaattattaaaaaggttaaatgggataaggggtgtagttttttagtaggaagtttagtaaatggagttttgtaggtgtttttgtttttatttttttattgggggagataaataggttagttttatttttatagttttaggtttttttttttgagtttttagtttagttaatgttagtagagtgttttttgttttttttttgttttgtatagaggtgtaggtataaatgtgagatagagatattatttaaagtgatgttgttcggttgggtacggtggtttacgtttgtaattttagtattatgggaggtcgatgcgggcggattatttgaggttaggagttcgagattagtttggttaatatggcgaaatttcgtttttattaaaaatataaaaaaattagttaggcgtggtggtgggcgtttgtaatttttgttattcgggaggttgaggtaggagaattatttgaattttggaggtagaggttgtagtgagttaagattgtattattgtattttagtttgggtgataaaagggaaattttattttaaaaaataaagtgatgttgtttttttcgaatattatttttttttgtgggtttttttagatttttaggtttggttttttggaggatttgggtaaggagggagggggtattggggtagtgaggggagtggtagagggtagggaggagtggattagaaggtgttgggtcgttttagggtgtgaggggagaaggtagcggaatagtggaatttgtggtttttttttttttaatataaattttttttgattagttagaggtagtaaagtttgttttgtttttttttttatagtttttttggttgttattagaatttggttaagatagttaggttggaggaggtatagttttttttggttttttgttaggtttttagtcgtttacgtggattggtggtgtagttacgtttttttttttggttatttttttttgtttatttttgtttattttattttgttattttgggttgtttagtttttttattgttttgtttatttgtgggtttttgagttttaatttgttatgtttttggttttttattgaaattttgttttttgtgttagattttattttggtgtttattattaattttttttttagtgtaggtggtgaagatttaaagttaatggggtttaggagggaagagaagggtattagttgagtgtttatataggttagggttatttttagtgaagttgttagtttggtgacgtttatagtattgtaggtagttttgttgtgttttatagtaatagattttggttttgtttttgttcgtgttcgtgtattggatcgggtgagaaagtgtgggtggcgtagatattttatattcgagaaaattaagtttaaagtatatggtttttataggtaaaaggtggggtttttagttatgtattatgaagtaggtaggttattgtttttttcggttttttttatttttttagtagttttgtgttgttgtgtttgttgtgttagtttttgtttttagtgtacgtttttttgttgtgttttggaagttgtattgagaaagaagagaaattgttttttgttttgaggagttgttatttagttggggatatatagcgtaagagagtagtttagagtggagaagcgggtaggtatttggttttagggaggtggtaggatttttttcgggttttgaggaatgatgagagaagtatagagtaggtagttagacgtggggttttgtggtgttttaggtgtatttagaattagcggatggcgtgggttggtgtgggatatgtatgtggaggatagtggtgtgggagaagggataggttgtttggatcgggattgtagatgatttataatattaggttaaaagaatttggattttataggaattgtagtaaatgtgagagggtgtagggaattaaacggttttgaatgattataaagggggttgaagtatggcgtgttgtagttttagttatttaggaggtggaggtgggaggaattcgaggttagttggggtaatttgagggattttataaagaggaggtttggggtacgagatttattatgtattgattgtttgttgtaggcggatacggtgtttgggtatttaatatgagttgttttgtttaatttttataatagttttatagggtaagtgttttttttttttgttttatagatgagaaaattaagttgaaattatttgtttaaattagttgttaataagtaaaaatgtttgaaaaagatttaaatttaggtttgttggatttttaggtttatatagattttattattttgtagttgatattatgttataaatgaatggtagaggtttatggataggtttaagaggttttttaaattttgtaaggatgtgtgtaaaattttttatgtatatgaatatttttagagagaagatttttgttgttaaagttggttaggtatggtggtttacgtttgtaattttagtattttgggaggttaaggtaggtggattatttgagtttaggagtttgagattagtttggttaatatggtaaaattatttttattaaaaatataaaaattagtcgggtgcgggggtaggtatttgtaattttagttatttaggaggttgaggtaggagaattatttgaattagcgaggcggaggttgtagtgagtcgattttatgttattgtattttagtttgggtgatagagtgagatttcgttttaaaaaaaaaaaagtgaagagtttttaagtgaaggttattggtttatgaggttttttttttatagttttttttttttgggggtttgagagttaggatagaagttttagtataagtgttttatataggggtttttggtagattagggtttaggtttggaagaaggaaaatggagtgagtacgaggaagagaaaaagtttggaaaagtagtttattttgtgttgaggagagaaggaaaggggttatttagagttgttttggggttttagggtttgtgggtttttttttttttttgtttttttttgtttggttttagcgagaggttatttttttttttttttttttttttatgatatttacgtttttttgtggatttatttttgtagttatagtaatatttttttttttttggcgtggaagttagcgtttttggtttatttttagtaggggatgttttttgagttgttttttttgtgcggggaggggtggattgagttatttatattttttatttggtttttttggtgattaagaatatagaaggagagggtatatttttaattaggtgtttcgaatatttttgcggggattgattttttttagtttaggtgtttttatgggattggttatattttttgatttagttttaatttttttttttttgtttttttgttgggaatatttttttatttttgtggttttttttttgtagtagacgattaagggtggaatttatagtttatgggttttgattttttgttttcgttttaaatagattttgtagttagttatttatgtagcgttttagtggttttgaaatgtaatagaaattattattttcggatcgtgggttttatgttagtgggtaaagttataggtgcgtttattgagtttttagtatatagttgtggtaggtatttggtgatattttgaaataaaagaatggaagaatgtgtttaggttgtgttttttttttttattttatttagggatatggtgtttttttttttggttttttgttttgtgtttattttttattttttgtaagtatagtttttatgtgtaaagtttttgtaggtgttggagggatttattgatggttttggcggaggtggtagtgggtatgtgtatttggttttgatatagttatttatgtaatattttgtgtaatttcggtttgggtttgtgtgttttgtttttatttttcgcgggtgattgttttttttgagttatttttttttttattggattagttttttttatttttttttagggatgtaatatatttttatgaataaatagtagtgtttatatggttgtgatgaggacgtattggggttttttttggatatggtatttatttgatgttagtggtgggtaggatcgtgttgtatattttaaaaaaattttagggggttttgttaggtgtttttattgtagtataacgagttgtttttagttgagaagttttgttttggggtttgtttatattattttttttttgagattatttttggtgtgggcggtgttcggttttattttttttttttttttttttgtttggtttttggtttaatggtttttttttttatggaatggttttttggagtttggttgggttagtttttattttttattttttttatgtttgtttttatttttttagtagttttgttagttttcgacgggtttagggtattgtagtcggtatttgggagtgaagattggggttagagttaggtttatttttggttattgaattttgaaagaggaggaatttggtaagtggggttttgtttattaagttttttttttttcgtttttttgagttttttttttttatttttattttttaaaagtagtagggagttagttgtagggtagtcgttttttggtcgaagtttttttggttgttttcgttatattttgaggttattttttttattttgcgaggagggaggtatatagaggttgtgattagttgttatagtagtaagattgtttttttttttgttttgcggagtgagtgtgagggaaaagagttttttttgtttgtttattatgtgtatttgttaaatagttattttttttattagggttattagtggtttttattgttattggttatttagaattagagttatagttttttcgatagggtgaaagagagcgttagggtgtagtttgaacgtgttttcgggagaggagaggtcggaaagatttgtattaggagggatttttaggttgggttggtttttggagcgtttaggaatgggattgtggtggtttatttttttttttgtgttttgggttgtttgagtgtttttgggtgagagtttttataggagggagttttttttattgtttagtgtttttttggtatttgaggtattatttagtatatagaggtgattaggaaatatagatttttgttagagaggtatttcgtgtttcgttttgtttttttgggttttgggattagaatatttttattagagatcggcgtcgattttttggtagtgtgtaatatttagttcggtgtcgaggtttgttcgtgtaggattgatttttatttttttaatgattttaggagataggaattattattattattattattattattattattattattattattattattttgagatggagtttcgttcgtagtttagtttggttaatatgatgaaattttatttttattaaaaatataaaaattagtcgggtgtggtggtgaatatttgtaattttagttattcgggaggttgagataggagaattatttgaattcgggaggtagaggttgtagtgagttgagatcgtattattgtattttagtttgggcgataagagcgaaattttgttttaaaaaaatatatatatatatatacgtttgggattatttttattttttcgttttgtttaagttgcgttatattatttattattaggtgatattttattatagatattttgtaagtatttgtgtatttttttttttttttattggaaggtagttttttgagggtagggttttgatttttttgattggttgtggtatttttttttgtagatcgttggtttatgaaataattagggagagaatgtgtaaatgatgatcgtgaggtttatttggataagtagtttgtgtttgaatttttttgagggttttagagtttgtttcgtttcgttttatatgtttggtttattttagaacggttattttgacggttaaagggatatttgtgtgttttgatggtggatttagggagtggatgatattagtgagggaaagagtaaaggttttggaggaaaatatttgagaggagtttttaggttgttttttggtggtagtttttggaataagatttgagagtcgttattttggtttttagtattgtacgggagtttagaggttattaaagaaatttttttaaagttttattttaaggttatatatagaatgaatggttaagtagcgataagaatttaagttatagtttgttgattttattattatgttattttgtttgtttttattataggagttgagattatattgtaaaaggaaaggtggggatggggtggggattggggaatttggggagggaattgattattgtttttgaggatattagggggaaaaatttataggaggtgtatttggtttaatttagtaagttttttgagttttgatttagtgttaggtatttggtgggtatttaattaaagattagtaggagaagaaaaatgtatagtaagagagtttaagtttatattaaagcgagttttgggtttaataattttgaaatatgaaattggtagagaagttaggagttttttttgggtttttacgttagggtttgttttttttttaatttaattttttattaaattttattgttatgatgtatatgtttgttttttttaaatatagagttttttgagggtagggaggattgaaattgttttttgggattgttattattatatagtattttatagagtagatgtttaatgaatgttgattgtgtgggtaaatggatgaataaatgaatggtttggagtttttttggttagagagttttaaagtagggtagataattattttttttgtttagtttaaagatattattcgttgtttaaggtttagggttgtgtttggtgtttttttaaggtaatttagtttgtataattagattttatcgtgatattagttttaggtttttttttttttattggttaagtatttaataattatttgttatgtttaaggttttgggttattgttttgtaaatttgtgattttattttgttatttaatttcgtgattttgtgttgatatagacgtgacggtgtttttggggtatttatttttaggtgagtttagttaaggtaggtagagaggaattagtattgtttaatttgaatggataagttagtataatgggtttttttgtgtaaatatttttatattatttaggtttatttagttttttttttagttaatgaagatagtttgtttgagtgttaaaatttattgtttattaataggtattaaaatttttaattgttttatgtttttttttttttttttttatttatttatttgttatgttagtttgggaagaattggtttgtagttaggtagttttttatttagttttgattttggtatttgtgatatgatttgtataggtgagttattttttttagtgttggtttttcgtttgtgaaatggggttaattatttgttttattgagtgttttttaggttgggtattaggagagaaggaagggatataaagaaagataaggtatagttgttgtttttaagaagtttatattttttaaggaaataaaggtatggaaatttatatagtgttgtggaattaaagaaggtagtatgttgtaaagagttttagttttttttttagataatattaggggtttagtttttttttttttttttttttttttttaagaattttttttagttggatatggtggtatatgtttgtggttttagttatttaggacgttgtggtaggaggattttttgagtttaggaggttaaggttgtagtgagttgtaattgtatttttgtattgtttagtttgggcgatagagtaagaatttgttttaaaaaataaaaaattaattaattaattaattttttttttttttaattaattttacgttattggtttgagggttagtttgaggggtttagatttttttttttttttttatttttagttttttgttatagtatatttagagatgtatgtgtttttttttattttaggtataattttttttttttttttgagatagttttgttatttaagttggagtgtagtggtgtaattatattttattttagttttaattttttatgtttaggtgatttttttgttgagtagttgggattataggtatgtattattatggtttggttaattgtttgtttttttttttgagatggagttttattttgtcgtttaggttggagtgtagtggtgcgatttcggtttattgtaacgttcgtttttcgggtttacgttatttttttattttagtttttcgagtagttgggattataggcgttcgttatttttttcggttaattttttttgtatttttagtagagacggggttttatcgtggtttcgattttttgatttcgcgattcgtttatttcggttttttaaagtgttgggattataagcgtgagttattgcgtttggtaatttggttaaatgttaaatattttttttgtagaggtgaggttatattatgttgtttatattggtattaaatttttgagtttaagcgatttttttgttttggttttttaaagtgttaggattataggtgtgagttattgtgtttggtttttttttaattttaattttttttttttttagagatggggttttgttgtgttgtttaggttggttttgattttttgagtttaagtaattttttattttagtttttggaatagttgggattataggtgcgttttattatgtttagttaatttattttgtttgtttagagatagggttttgttatgttgtttaggtttaggtatagttttaatagaggagagagatttttagatatgagtttttgtatttggtattaagattttttttaattttttttcgatttgtttttttaatatgtttttttttttttcgggttattttattttaattatttcgatttattttttgttaattgggttttttattaaataatttagttttttataaaatatatattaagtgtgtatgacggtttaggtattgtattttttgttagggttatatagatgaataaagagttgggatgggttaggcgcggtggtttatgtttgtaattttagtattttgggaagttaaggttggtggattacgaggtcgggagtttaagattagtttggttaatatggtgaaatttcgtgtttattaaaaaaaaattataaaaattagttaggtatggtggcgggtgtttgtaattttagttatgtgggaggttgaggtaggagaattgttttaatttaggaggcggaggttgtagtgagttaagatcgtgttattgtattttagtttgggtgaaaagagtaagatttcgttttaaaaaaaaaaaaaaaaaaaaaaaagagttgggatgatgtagtggttaaaattagtgttgttagtatagtatagatttaaattgaaattttagttttgttatttgttttttgtgtgattttgtatgggttattgtatttttttaggtttgtttttgttttttgtgaaatgattatgatagtattgttatgtaaattaaacgagagtttaagttgtagagtatttattaatagtgttttatggtatatgcgtagtagaaagtagttgtaatagtgtgtagtaaatattttgtattttaggttggattttttagaagtaggttttgagataaagatttaagtaaaagagatttatttaaaattaatgagaagttgggtagggtggtttacgtttataattttaatattttgagaggcggaggtaggagggttttttgagtttaggagtttgagattaggttgggtaatatagtaagatttaatttttataaaaaaaattagttagacgtggtggtatgcgtttgtgatttagttatttgggaggtttaggtgggaggatcgtttaggtttaggttttagtgagttgtgatcgtgttattgtattttagtttgggtaatagagtgagaattgttttaaaaataaataggttaggtatagtggtttatgtttgtaatttcgatattttgggaggttaaggcgggtagattatttgaggttaggagtttgagattagtttggttaatatggtgaaattttgtttttattaaaaatataaaaattagttgggtatagtggcgtatgtttgtaattttagttatttaggaagtagaggtaggagaatcgtttgaatttaggaggcggagattgtagtgggttgagattatattattgtattttagtttgggtaacgagagggagatttcgttttaaaaattgaataaataaataaataaataaataaaagtaatgaggggattgggtatgatggtttatatttgtaattttagtgttttgggaggttaaggtaggaagattgtttgagtttaggagttttagattagtttgggtaatatggtaagatattatttttgtaagaaattaaaaaattagtttagtgagtggagtgtatttatagtattagttatttagaaggttgaggtaggaggattatttgagtttaggaggttgagattgtaatgagttatgattgtgttattgtattttagtttgggtgatagagtgagattttgttttaaaaaaaaaaaaaagtaatgagggtggggaggagtggaaagggagtgggaaagtgggatttaagtatatgagtggaattaagttaagttttatggagggttggggtattgatatttttatatttgtttatcgttggttaaggtttgggggcgggttgggggagtgggagggtggtggtatgtgaggatgtgggagagaaaaatttttaagtgtttttagttttttgtttttggaaaaggtttcggtagaggtataggcggggttgttgggagtgatttagtattttgggagttcgtaggtataaaaatggtaaaggggtttaagaagaaatgcgtagaatatagtttttgttttataaggtttatggtttgggaagggaagatagatatgaataaattattgttatagggtgattggggtgaagggcgttgggggtcgggtggggtgcgggaaggagtggtgtaggtagaggtatttttgaggagaaatgtagttggtttgggagaggacggttattttagatatagggaatagtatatacgaaggttgatgtatatacgcgtaagggttggtttttagagttggtggttttggttacgagagtttattatttgggggtagtttttgtatttgtattttgtatgaggtttcgggtttgttttttttggtttattttttagatatattgtttgttttttttttaggtttcgtttcgggttttttttttagaagttttttttgattagtttagtttatcgtgatttttttgaatttacggcgtttattgttaaggttattatattggcgttcgtttatgttattattaggaaatatgtatttttattgtttttgatgttatttaaatttgtttgtaaattttgttttttttaattttaagttttgagtagaaattatatatttttattatttatatttttatatttttttatggtattcggtattcgtggatatattgaggaagtaagataatgaatgaatgaatgggtgaatttagtttagtttggggtttatttaattttattaggtttaatttataatttttatgtgtttttagattatttttaaattttaagtttagttttgttttattcggattatatgtagtttttttttgttttttgttttttgagacggggttttgttttgtcgtttaggttgtagtgtagtggtacgattttggtttatcgtaatttttgttttttaggtttaatggatttttttgttttagttttttgagaagttgggattataggcgttcgttattatgtttagttaatttttttgtatttttagtagagatagggatttattatgttggtgaggttggtttcgaatttttgattttaggtaatttattcgttttagttttttaaagtgttaggattataggtgtgagttattacgtttgattttatgtgtagttttttggttttttatttgtttgtttttttgagatggagtttcgttttgtcgtttaggttggagtgtagtggtataatttcggtttattgtaagttttattttttaggtttacgttatttttttgttttagtttttcgagtagttgggattataggcgtcggttattatgtttagttaattttttttgtattttttagtagagattgggttttattatgttagttaggatggtttcgattttttgatttcgtgattcgttcgttttggtttttcgaagtgttgggattataggcgtgagttatcgcgttcggttttttatatgtagtttttaatgagagttattatataagtaaattgggttttaagtggtgaaatttaaggttatgtaattttagttttttttaatttttttttatttttaattttggtcggatatttgattgatagtagattattgggatttttgagtttttgtttttttaatttgattgtttttttaaaggattttgaaaaattatgttttttgtatatttgtattgttttgagatacggttttattttgttgtttagattggagtgtagtggtgttattttggtttattatagttttaattttttagggttaagtaatttttttattttagttttttgagtagttgggattataggtgcgggttattatatttggttaattttttaaattttttgtagagatagttttgttatgttgtttaggttggttttaaatttttggttataagtaatttattcgattcggtttttcgaagtgttggtattataggtatgagttatttcgtttagttttttgtatatttttaagttaatatttaatatttgtaataatttaatagtattttaaagggtaggttttttagggaattgtaaatatatgttaaaaattatattattatttatgtatttatttatttatttattatttttgagatggagttttattttgttttttaggttggagtgtagtggtgcgatttcggtttattgtaatttttgttttttaggtttaagtaatttttatgttttagtttttcgagtagttgggatgtttagttaagttttttgtatttttagtagagatagagttttattattgtttaggttggttttgaattgttgattttaagtgatttgtttattttagttttttaaatgttgggattatagtcgtgagttattatgtttggttatgttagtttttaaaattaaaaataatttgttgtgtttagtttgtcggagattgtacgttattttaagtgtagtaaattgaatataatgttatagaatttttatatttgttagtatttttttaaaaaatacgtgaataagtttttgaataagtgttagaaatagttattttatttgtattgtaattattgtagttaattaaaattaggaatatttataaggattaaatataaaaagttggttaggcgcggtggttcgtgtttgtaattttagtattttgggaggttaagatgggtcgattatttgagttttggagtttgagataagttcgggtaatacggtaaaattttatttttaaaaacgaaataaaattaaattaaataaatataaaaaattagttaggggtggtgtatttgtagttttagttacgttagaggttgagataggaggattgtttgagtttaggaggttgaagttatacgagttatgatcgtgttattgtattttagtttggatgatagatggagattttgttttaaataaatatataaaaagatatgaaaagtaatttattgaaaatgtattttttggttaggcgtggtggtttatatttgtaattttagtattttgggaggttaaggtaagtagattttatgagattaggaattcgagattagtttggttaatatggtaaaattttatttttattaaaaatagaaaatttatttgggtgtggtggtatatatttgtaattttagttattcgggaggttgaggtaggagaattatttgaatttaggaggcgaagtttgtagtgagttgatatttgtcgtgttattgtattttagtttgggcgatagagagataatacgttttaaaaaaaaaaaaaaaagaaaagaaagaaaatgaattttttaatgagatgggaaaggttgatttgttttttattgatttttggcggttttgggaagggtattttggttaggtttaggataagtaggagatttattttagcggggggtatatattaatttggaaattgatttttttaaaattggttttgtcgatatatttttgggaaggtttgtatatattattaggggtatttaagttataggttattaaatagagatgaaatttgtttttttattttttaatatagtgtttttagaaagggagaaatgtgggtttgaatgttattgtgatttgtatagtgatatttttaattttttttttgttaagttttagagttttatatgttggatatgggtaagataggaatttaagttatttttaggttttcgtaagtttaggattgtgaagagggtattttaatagttaaaaatataagtgttggtcgggtacggtggtttacgtttgtaattttagttttttgggaggtcgaggcggggagattacgatgttaggagttcgagattagtttggttaatatggtgaaattttatttttattaaaatataaaaattagtcgggtatggtggtgcgtatttgtaattttagttatttagaaggttgaggtaggagaatggtttgaattcgggagtcggaggttgtagtgagtcgagatcgtgttattgtattttagtttgggtatagagtgagattttatttaaaaaaaaaagaaagaaaaagaagaaagaagtcgggcgttgtggtttacgcgtgtaattttagtattttgggaggtttaggcgggtagattacgaggttaggagatcgagattattttggttaatacggtgaaatttcgtttttattaaaaaatataaaaaattagtttggcgtggtggcgggcgtttgtagttttagttattcgggaggttgaggtagaatagcgtgaattcgggaggcggagtttgtagtgagtcgagatcgtgttattgtattttagtttgggcgatagagcgagatttcgttttaaaaaaagaaaaaaataaataaataaaaataaatgaaaaagattttaagtgttagttaaagtagtagtttagatttagagttaagaaaatatgatttttattttttcgttttatggaagtagtagttgtttattgatagtttttgtcgtcggttattaggtggtagaagggaatatagtatcgtagttttgttttagcgatcgcgcgggtaggaagatcgggtgggaggtaggtggggtcgaggtttggaggcgaggtaggagagtaggtttaggttgttagaggaaaaaacgggcgatgtgaggattaagtatggattttaggaggggataggaaatattgagaatattattttacgggtttagaataaaatcgagggaatgaggaagaggtttaaggagataggttaaattgggaagaatttacggggaattagagggtggagagggcgtgggtgtttggagatgtttgggaatagaacggttgaggggattttattatttgtatttttttcggggtgggtttaggtttggttttttttgaggtcggttgtttattttaggggtaggaggttaggggttttttgggggttggggttttgtcggttaagggtcgttaggtcggggaggttgaggaggattcgttttaggcggtttagggggttagattttagttttaggtaggtttttttagggacgattggggcgggtaggcggaggatttttaaagagagggggtgtttttggttaagggttatcggggattggggggttttgaggtaatgttggggagtttgttttttttcggttttttgcgggtgggtgagaggggtggttttcgttgtttgagatgtttgtaaaggaggaaggagaaaggtaagaggtggtgagggtttttttttttagttttatttagttttagttttaggaggaggagtttgtttggacggacgtagtttgaattgatttataaatagattaaaaaagttatttttaaagagttttcggtaggtttgtaaatatttaattgatggtaaaatgttatgaatttttattttcgatggatttgaatcgtttatttgatttattttaaattgattagatttttttaaataagttttatttatttttggttggggtattttattagttttgtttttaggttaatttgtaatttaaggtgggttatattttggtttttaggtatatagattttagttttataaggattttagttttttaatatagattttagttttaaggaaattcgttttttttacgttaattttgatcgattttgttatatggagttagtaaattatttttggtgagagttaaatgtattttttgtattatgttttttatttaatgtgtttagaaagttatttttggtgagttagatgtattttttgcgttttttgaatttttgtttttaattttatgcgtttagtttattttcgttattttgagtattttttattattttaaattgtagtttttgtttttgtttttattttatttttggtgtgtaggtaaaggattaggatttttaggagtttttagttgaggattatggttatgtattggtttttaaagttggggtgggttgagtttgggtgtttgggaattttaagaggttttataggggaggagtggaggagggattagtttagtggtataggaatattattagaatagaattggttaaattcgttgggaaggtttgggttgatgtgttatttttgaaggtggcgttttttattttagttttttagtttaggatttagttgtttgttttttttattatgatttagagtttgcgttattttattttggtttttatattttttatttatattttggagtagttaatatttatttggtattttcgtaattatagagatgtttatttttattttttgtaattattggaagttaaagaatgggagtaaattatacgatgggcgttgggaagtatcgtaattatagggttgggaggtaggatgtttgcgttgggggaggaggtgttttttaaatttgggatgtagttgggatagtgttagttattattttagtttttttatttattttcgtattgaaagttttttttggggtttcgtgtttttttgggtatttttttttttttatgggatttaggtattttgttttttattatgtttttttttaggtatgtaggggatttttaagtaatgatatttaaggaattttatttggtagttatttaggatgattgtagaaaaggaaggatataggaggatattttggttttttttttttatttagagttgtttgtattagttttgttaatggtttcggaagaagttgttaggttttagtaattttagtttttttttttttttttaggaatttatttattcgtttttaggattttggttttaattttattgtattcgtttttttttttttattttttttttggttttagttttttgatttaagttttttagagagatttttagaatgttttttttaaggatttttttgtttggaagtttgttagttttttagaagtaatatgtttaaaataaaatttgattttttttaggttgttttttgtttggttcgttattttatagtaaggaatattttattatgtaatggcgtgattttatttgttttttttagggtttacgtagaaattttcgttatatttttttattatttatttgtaagtttttttatattttgtttaaatttagtttattattttgagttattattttttttgagtttttttaatatttttttaattggtttttttgtttttattgtttattttttttttttatataaagtttgttttttattagtaaaagaggttttaaaatatatattacgcgggtttggtgtggtggttcgcgtttgtaattttagtattttgggaggtcgaagcgggtagattatttgaggtcgggagtttaagattagtttgattaatatggagaaatttcgtttttattaaaaatataaaaatattagtcggatatggtggtatatgtttgtaattttagttatttaagaggttgaggtaggagaatcgtttgaatttaggaggtagaggttgtggtgagttgagattatattattgtattttagtttgggtaacgagtgaaatttcgttttaaaaaaaaaaaaaatatatatatatatattaggttaggcgtagtggtttatgttagtattttgggaagttgatataggaggattatttgagtttaggagttgtgtgcgttgttttatttgtagtaagattgtgggtaatacgtgggaggtttatttggggttgttgtagtttaagtacgttgatggggacgttttgggtttgaagtattatagtcgttgtttgtcgtatgttgttggtttacgtggatttgatgcggaaattgtttaattatgtttttttggggaagtgatttggttagatttatttatttgttgcgttgggtgtcgggagtaatcgttgattatagtgcgtggatatgtgtattttattttggaagggattatttagtaagttttttaggaaaaaaaatgtatattaaattatgttgcgttttttttttgtttggggagtgaggataggttttcgtttttttaggttggggtgtagtggtgcgattatagtttattgtagttttaattttttgggtttaaataatttttttaatttagtttttggagtaattaggattatgggtgtacgttattatgttttttaatgttttttatttttattttttatatagatggagtttttttatgttggttggttttaaatttttgggtttaagcgattcgtttatttcggttttttaaaaaagtgttgggatttagttatttcggaggttgaggtaggagaattgtttgaatttgggaggtggaggttgtagtgagttgagattgtgttattgtattttagtttggtaataagagtaaaattgttttaaaaaaaaaaagtgttgggattataggcgggagttataatatcgggtttttttttttgttttttttttttttttttaattttttttttttttttgaggttgagtttcgttttgttatttaggttggagtgtagtggtatgattacggtttattgtaatttttatttttcgtgtttaagtaatttttttgtgttagttttttgagtagttgggattataggtttatattattatatttggttaattttttgtattttagtagagacgaagttttattatgttgtttaggttggttttaaatttttgagtttaggtgattcgcgtgttttagttttttaaagtgttaggattataggcgtgagttattatatttggttttttttttcgtttttaaagaagtattttaatggttttttattgatttatagtaaaatttaaatttggttatatttcggtttcgtagtagtatttttgagtattttttatagagattttttggtttttataggagtttattttaggtaggtttttgtataaggttttttgtttagaggtttttttttagagttagtttttattatattatcgtattgtattttttttttaagtatttatttgaaacgatttcgtttatttgtttaggttttatttgttcgttcgtttttttattaggatgtaggtttttagggtttaagtggtttttaggttaatatagtgtttggttttgatatttttgttgaacgagtgaatgttttattttttttatttttagtatttattattttttagaagaaaagagttttaaaataaaagttgagaataaagaaaagtaggagttttttaaatatttttaaagttgtttagaaaaaggatttgaaaaggtgttatttatagagagagttatgggtgggattattttttataatttttaagagagatggttgtagggagaatttttatagatttttagaaataatatttttaaataatggttttttttgtagtcgtttttatttagagtagaatttagatttagttggtattttttagggtaattttaggatggggaagggttggtttgtttttatttatttttttaggatttttttagtttttaggttggttttttttttaattgttagttgtttagttgtttatttggggattggagttggagtatttgttaaggttgtttttttgataaatagttttttttttggaaatggttttatttaggttttgtaggttatcgagtaggatagagagggattttgggaaggaagatagtagatgagtattagataagggaaggtgttcgtggttatagaggaaatagggttggtataggaaatgaggaatgggagagaggaggttttttggtttaagttgggtatcgttaaaagaggttaagggtttcgaaggatcgtagagaataatatttattatgttagagtttgaagaggagatttttgaagtgcgcgtatttgttttttgtttttttgtgtttggtttaagattttttatggattttttggtgggtattgttgttgttataggtgtagatgttgaatattttggaggtttggggttggatattatagatttttttttatttagtagggaaggaagaattgttaatagtcgttgttgtttgtaacgggagaggagatttttttgttgtaaggtggtttgggaaggagagggttaaatttagttcggatagagttttttttattattttttttttatatttttagtttaggaattagtttaggatgggttttagtgtttgtttgtttgtttttttgttttttattagtatgaggtttttatttttttttagtttttgtaagcgtcgggttagtcgttgtttttttttttttcgggtttttttttgtagacgtttgagtttttggtttcgtttttttttttgggcggttttgcgttgaatttggcgtaaggagattattatagagaggttaaggtatagaggaggtaggtgtgagttaggttagaggtagttaggtattatgaagataggaataaacgttgggttattaattttgtggtttggggaggttgttttgttttgtggatttgttttttttgtatagttggaggggtgggttgatgttttaggagtttgggaatttgaatttaagtattttttttatttttgaattattttggagttttttaggggaaatttgaatatgaattgggttagattttgtgtaattagtgtttattgttttaaagtgtgatgattgtagttatataggagaatttattggttttgggagatgcggttgaataatttatgtttataatttatttaggcgtggtggtttacgtttataattttagtattttgggatgttaaagcgggcggattacgaggttaggagttcgagattattttggttaatatggtgtaatttcgtttttattgtaaatataaaaattagttgggtatggtggtgggcgtttgtaattttagttatttgggaggttgagttaggagaatggtttgaattcgggaggtagaggttatagtgagttaagattatgttattgtattttagttggtgatagaggaagattttgttttaaataataataataataaaatattaaatgattataatttaaagtgatttaaaagatgtataaatatgtgtgtatatagataagagattaaatgtggtaaatgttaattgttatatttagttagagaagatatatttattatataattttttttttgatatatggtttttttttattatttaggtttgagtgtagtggtataattttggtttattgtagtttcgatttttcgggtttatgtagtttttttatattagttttataagtaagtttggggtataggtgtttattattaggtttagttaatttttgtatttttagtcgagatagggtttcgttatgttgtttaggttggttttaaatttttgattttaggtgatatatttatttcggttttttaaagtgtttggattataggtataagttatcgcgatcggttatatgttgttttttaatttggtgttggttatatgggtgtgtttacgatgtgataatttatttgtgttatttttggatatttttattattttttgtaatgaagttttgaatatattttgaggggaaaataataattttatgttttaatatttttttttttttggaaggttttatttattttggtaaggtttatcggttttggtatgtttttttcgagtttcgtttagttttttttttgtgtttgagagttgttttcgtagtcgagtttttattttagttatttttttttgtagggttggggtgaaagtgtagacggggtatattagtaggagttttgattcgtagtttttattttattttttaagggaagtatttatttttttttcgatattttgttcgtagagtttttgttgttgggttagtttttgtcgtagattggtagttttttttgtgtttttttgttggttttggcgtgttatttttagttgtagttttaagttagttagggatttttgggtttgttgtagtttttgttttagttgttgggttattttgtttagttgttgtcgttttgttttttttaaaaggagggggtgttgggttaggttttttttagtattttagatattgggtttttttttattttttttattttttggtaattaggtgtattttgttttcgagttcggtttattttttgttggatgaggcgggtatttagttgtagttttgtatttaggcggtttcgtttttttcgtagttgttgtaatttaaggtttatatttgtgatcggtggtggtaggggatagttgggacggggaagagaaagagttaggagaaataatttagttgtttgattttaaagtttttattttattttagtttttatggttttgggggttttagtagttaatgttttaaagttttatttattttaaagtgtataaattttattttttttggcgtagttgagtaagggtaagttttcgagtaattaggtttggaggggaaaaagtagggagaaaaagagatgaagtttgtatgggagaaagtggggatagggagtaagggaaaaagagatgtaaggattggtgaaaggaggaaggtgaatggatgtgggattagagagagttgggttaggaagaagaaagttcgagttggtggggtgggggtaggacgtggttcgtagttgttttacgtatttcgaatggtgtggattttgcggatagtatagttgagtcggttgttgaggttgggaagttgggcggtagttttttttattttagttatggtggtttcgagttagatttgagagttggagagggtataagttattgattttttatgtttttttttatttttaaaggatttgttgtgttttgtatagataattttttttaattttgttttattatataagtatagaacgtatagttttcgttaattatttaaaggatttttgttttaagaatgtattaaatgattatttttttaagtaatttgttaagtttattttttataattgtgttttgtttattatcgtgtattaaagagtaaagttattttttttggttaggggtagtggtttttgtttgtaattttagtattttgggaggtcgaggcgggcggattatttgaagttaggaattggagattagtttggttaatatggtgaaattttttttatttaaaaatataaaaattagtcgggtatggtggtttatgtttgtaattttagttattttagaggttgaggtacgagaattatttgaatttaggaggtggaggttttagtgagttaagatcgtatttttgtttttaagattgggtgatagagcgagattttattttaaaaaaataaaagaaaataaagttattttttttaagtttaggagtgtcgatttagtattaatgacgggtaggtttatatgttttattagttggttgtgttagaagtaggattaatttggtttatgaaaattgagtagtttaaataggttttaggaggaggttaaggagtgtttggggtcgggttggggtttttttaggagagtttaggtttgtatttatagaaaaatatatgatgatgaaggtttgtagttgtatttttagtagtatagtaaagtttattttgatttggaaattgttttagtagatgtttttaatatttattatagtttttattaaagtttttaattatttagagataatttaataaatttagtaataattagagtttggattgttttaagtttggaggattttcggtaaatgtattattatatagattatttttgtgattatttggtattaaagttaaattttgtttatagtgtatttttttgtttttttggaggtagggggtattcgcgatggattgaatttgggtggtaggttattataattagtttaatttcgtgtaagtttgaaattttttataatttttaaagttaaattagtttttaaggtataaatttaagagaaggaagtggtgggtaaggatttattttgtattttaatttcgttaaattaaaaattatttttatttaaattaatttattaagaagagttttacgataataataaatatttataagttagagattgtgttaagaattatttgtcggtcgggtacggtggtttaagtttgtaattttagtattttgggaggtcgaggcgggcggattacgaggttagaagtttgagattagtttggttaatatagtgaaattttgtttttattaaaaatataaaaaagtagtcgggtgtggtggtgtgtatttgtaattttagttatttaggaggttgaggtaggaaaatcgtgtgaattcgggaggtagaggttgtagtgagttgagatcgtgttattgtattttagtttgggtgatagtgcgagattttgttttaaaaaaaaaaaaaaagaattatttgttttgggtattttagtgtttaaggttgaggggaagttattattagtataaagaagttttgttgtttttttagaggtttttttgaaggttatataataattgtaggtaatgaaataattaggaagttggtaggagagataaaggttggtaattgatttagaaggaaattaattggtttatattttagatggaatagtaagtaagttaagtatataataagtaagtaagtatatagttttaaataaatagattaggttaggtgtagtggtttatatttataattttagtattttgggaggttgaggtgggtggattatttgaggttaggagtttaagattagtttggttaatatggtgaaatttcgtttttattaaaaatgtaaaaattagtcgggcgtagtggaggatattggtggaggatgtttgtaatttagttattcgggaggttgaggtaggagaattatttgaattagggaggtgaggttgtagtgagttaagattgtgttattgtattttagtttgggtgatagagcgagattttgttttaaaataaataaataaatagattaaatttttttttagtgaaacggattgttcgtaaaattttagaaaaaaaaaggaagatgaagtgtttatattttttatttttgaataatattgtaagtgaagattttttcgggtgttttatttagtttaagttattattagattgaattgtaggaggaagtaaggttttatttttagttaaatatgtaacgggaaatttataataagtaattaggtatgaatgtagaaggggtttttttaggaaaagaaacgaatataggaatattgatagagttaaatttgtttagttttgtagtttttagtggttattttttagttttttttgtttgaggatttttagtaataaggtgtttaggaatttgaggtggtagaaatattattttatttatttttttatttttgatatttgttgatagtattgattataagttttagttgtttttcggttgaggttgtttgttgttgttatcgacgtttggttttttgagtacggtttagttttaattgtaggttttggggaggatgtagtaaaggatagggtttttttttaagttttggttgtagtttcggaataggggtttttttgtttttttcgagtttttagtaggttgatattaattttggtatttatacgttttatttttatttttgcggttttgttttgtagggatcgttgtaggatggtttgtttttggttttgggatgttatttttttttggagtgaggttatttgggggaggagagagagttgggtagggttttttagagttaaaagatgaggggggtattggaagtaaagtggtaggtgtagagatttttgtaagaatgttatgtaggggttggggggagggagggcgggcgacgggggtgggtcgtagtacggtggtttatatttgtaattttagtattttgggaggtcgaggtagatggattatttgaggttaggggtttaagattagtttggttaatatggtgaaagtttgtttttattaaaaatataaaaattagttgagcgtgatggtatgtgtttgtaattttagttattcgggaggttgaggtaggagaattatttgaatttgggaggcggaggttgtagtgagttgagattaggttattgtattttagtttgggtgataagaataagatttttttttaaaaaaaaaaaaaaaaagaaaagaaaagaaaaagaatgaatgttacgtagggagatagaagtttaggttttgaggatggaatttgagtttagtgttttatgttttatattttatgtgtttattcgaagatgggaatagtttttgatatattttataagatttattaattgattatgttattttttttagatgttgttatttttttagagaggttgtttttgagtattttatttgaggttgatttattttatagttttttcgttatattattttttgaattttttttattattttttttttttttgagaaaagatttcgttttgttatttaggttagagtgtagtgatgggattatagtttattgtggtttcgtttcgattttttagttttaggtgatttttttattttattttttagagtagttgggattataggaatgagttattatgttcggttaattttttgtatttttagtagagacgggattttatatgttgtttaggttggtttcgaatttttgatttttagtgatttatttgtttcggttttttaaattgttggtattatttgattgggtacggtggtttatatttgtaattttattattttgggaggttgaggtaggtgaattatttgaggttaggagttggagattaaagtgatcgtattataggtgtgagttattgtattcggttttaatttttttatcgtatatataattatttaatattatttgtttatttgcgtgttttgtgtttttgttttagaatgtaagttttatattttagttttgtttagggttgtgtgtttagtatgtggtaattatttaataaatattggttgaatggatgttatttttatggaaggagtaaggtgttgggagggaatatcgggagaaaagagagtgtagtgatttgtttttttagttgtttaatagagttattgtgttttagtttttgggtttttagttgtattatgagggtaaatattttttttcgttagcggtttagtagggattggtattttttggtaaatttaggttttagggaatttgaaggttgaatttgagggagaaggagtgggagaaaagtgtgggtttttgggggaggagaggaaggaggtggtatttttgttttttttttgttttgtttgggtaatatgagttatagtaagaggagtttataggaaggagatttaagtaggttttggggtatattgattttttttgtttatagggagggaggtaggggatagtagatgtaggatgcggttgagggtgaggggtttgggggttgggttgtatttttttggttagtttttttttttgtagggcgaggatgtgtgtgaggttttgtattcgtatttgtagtagtttcgcggtggtatgtaggttgtttcggtttttttgtaagtgttgcgggtagaggaaagtagtttttttgtagggtttttatgtcgttttaggtattattttttttttcggaggttgtgttttatacgtttttttaagggttacgtttgttttttaatttgatttttaagtttgtatatagatatatttttgtatttttatttgtatggtgtttagaagtttttgtcgttttagtttttatgtttggttgtggattttagaagggatttgttttttaatatatttttttagatttttaattagggttatttgagtttttaagtttttttgggttttgttagggttggggtgggaatgggatagttattagtggggcgttttgtagatttattatattattaattgttgggttttcgtcggcgttcgtttatttattttagttgttttcgaagtagttcggtttttttttgagtttcggttagttttttggttttttttgtttttttggtttttagattatttagagatttttttaagtttttagttttgttggttaaattggaaagagttttttcgtgagtttgtgttaaagaggatagttgcggaaagaagagggggtttagtagaggttcgattttatatggaggttttttttgttttttttatttttattttttgtgattttagagaatgatttaattaattagttaattgtgtatagtaaatggagagttggtaatttatttttcgtagttgttttataatttattaggagtttttgttcgattttttttaaaatatatttttatttttttgttttcgtttttattgttattaatttttattttttgtttgggtaatagcgattattttttaattagtttttataaatttttagtggttttttatagtatttataataaaatttaggtgtttttttatatttgtaggttaggggattcggtttttgtttattttttgagtttattttggaggtttttttattgtttttcgtttcggttacggggagtttgttgagaattagatagcggtttttttttgttttatagattttaggcgatagtttttttttagggtggttttattgggttttttaatattgtttttttttattttattttgttttattagttgtttacgtttttttgagtatttagtattgattatattttgtttatgtgtatgtgttattatttgtcggattatattggaaggaaagttttaggaaaggaggaattttgtgttttttgtttatggtattttaaagtgttgtaggggtgttagagttattaagagttatgggatggattggaaaggagggtaaagtgtttattttgttttttggtttgttttttttagttttgtttttatataataataaaattaatttgggggatataaatgataaaattttttagatataaaatataaatttaattatgttatttttttgtttaaaattttttaataggtcgggcgtagtggtttatttttgtaattttagtattttgggaggtcgaggtgggtggattataaggttaggagattgagattattttggttaatacggtgaaatttcgtttttattaaaatataaaaaattagttgggcgtggtggcgggcgtttgtagttttagttattcggaagaatgatatgaattcgggaggcggagtttgtagtgagttaagatcgcgttattgtattttagtttgggcgatagagcgagattttattttaaaaaaaaaaaaaaataattttttaacggttgtttattatttgaaaaaataatttttttttgtttgtttttttggagatggagttttattttgttgtttagattggagtgtaatggtacgattttagtttattgtaaacgttgttttttaggtttaagcgatttttttgttttattttttcgttttattttttcgagtagttgagattataggtatgagttattacgtttagttaatttttgtatttttagtagagatgaggttttattatgttggttaggttggtttcgaatttttgattttaagtgatttattcgttttagttttttaaagtgttaggattatatatgtgagtaattatgtttagttttaattttttttataaaatagagatgggggtttcgttttgttgtttaggttggttttaaatttttgggtttaaatgatttttttattttggttttttaaagtgttaggattataggtatgagttattgtgtttagtttgtttattgtttttatgggaaagtagtaagttttgaagtggttaaagttttgtgttttgggttttgggttttgtagtatatttagtgttttttatttttgtgttttagttttttggttttttgttttcgtttttatttgttgttttattaagtgttttttagttattattggattttatacgtttttttattggttaatttttatttagtataaacggtagtttgttgtttttttagtttcgttttgttgtttaggttggagtgtgatgttagtttattgtaatttttgttttttaggtttaagtaatttttttgttttagttttttaagaagttgggggattataggcgtttacgattatattcggttaatttttgtatttttttgtagagttttttatgttggttaggttggtttttaatttttggttttaagtgattcgtttatttcggttttttaaagtgttgggattataggtatgagttattgtgtttggtttagttttttgtttttaagttttttttataaattttttttgtttattttttgattggattgttggttttttttttattaatttttaggtatatattttatattagggatattattttttttttgtgatttgagttataaatatagtttttttttttttttttggttatttttaatgtttatgttataaagttaatggattaatttttttttttatggtttttagattttggattttgatttataggtagaaaggttttgtttattataaggttataaaggaatttttttttgtttttttttagttttttttttattttattttttgagatagagttttgttttgtcgtttaggttggagtgtaatggtatagtttcggtttattgtaatttttattgtttaggtttaagtgatttttttgtttcggttttttaagtagttgggattataggtgcgtattattatgtttggtgaatttttttatttttagtagagatagggtttcgttatgttggttaggttggttttgaatttttgattttgtgatttgtttgtttcggttttttaaaatgttgggattataggcgtgagttattgcgtttagggttatggtttttttttttgatatgttaattggttatagtggttttttttgaattttagattaagttagtgttttttagttttttttttttaaggtattttttttgattgtaattaattatgattaaattaaatgtggatgtgtatattttttacgaggttgttagttttatttacgaaggtaggatttaggttaatttggttattgagttttagagatggtagagtaagtattgagtttgaggattgaataattttttttttttagtttattatagtttttttatatttattttttttattgttttttataatatttttgatgaattggtatttggagtaaagtagggaggtaaattattttttattagaaagggaagtagggttttaagtggtgggaggttatttgagttttgggggaaaagtgtaatttgaattaagataaaagtatttaaattttttatttttttagtttatgtgtgtttatttttattaaaggttttattattttattatttattatttatggagggttttttttgtaatatttgttttttgtttggaagttattgtttagtttttcgttatgaatttgaattttttttatttttgtatttatttgtttttggtgtagtttttgaattttttttagttttcgttgtttttttttttttaagttttttcggataattttagttttagttaaagtagtacgtaggtttttagttttagttcggtcggtttttttcgttcgtgttagagtttttagttttatggtttgggtttttagttttattttttgttgtagcgaggtttttcgtaggagtcggatttttttttttagtcgtcgtagtttttgtagttgtcgaacgattattttagtttgttggtttagggtttgtgatttttttagtttttaggatttttaaagataggttagtgtaggtgagatttgtttttagtgttggaaggatagttgagggtataaatatagttaggagaaggaaaagaggatttttttgttttcgtgtggggaggtgaagggggtgttgaagttggggtatggggatgtttgtattgatattattattatttattaaagttttattgagtatgttgagtttagtgtttggatttataggatttaaagtttggttgagatcgtggaatatgatttttttagagagagttatatataggaggatttaatattaaatgtgtatattattaggttatatattttttttgttttttggtggtttttttgttttatttatttttttatttttaggttatatattttaagtggaaaggttggaagaatatatagggattttttaattttaatttaagggtaagaagtttgagggaggaatgggtatagagaggtcgtaagtttttagtattaatatggtgaggttaggtgttagttaaaaggtatttattggttgggcgcggtggtttatgtttgtaattttagtattttgggaggtcgaggcgggcggattacgaggttaggagatcgagattattttggttaatacggtgaaattttatttttattaaaaatataaaaaattagttgggcgtggtggtaggtgtttgtagttttagttgtttgggaggttgaggtaggagaatggcgttaatttgggaggcggagtttgtagtgagttaagatttttttagtgtattttagtttgggcgatagagtgagattttattttaaaaaaaaaaaaaaaaaaaaaaggtatttattgagtgttaggtatattttatgaggagtttgagagaatagtatataaataatatagtgttagtttttagagaaatcgtttattaatgttacgtgaagtttaatttagtttggaatatggtttttgaggtagttttttgagatttaggattataagagattgttgttgttgtcgtttttagagatagggtattattgtgttatttaggttttaatgtagtggttggattataggttattgtagtttttaatttttgagtttaaggggttttattattttagttttttgagtagttaggattataaatgtatgttattatagttagttaattattttttgtggagacggagtttcgttttgttgtttacgttggttatgaatttttgggtttaagtgatttttttgttttagtttttaaagtgttaggattataggtgtgagtcgttatatttggttcgtttttttttttttttttttagtagtagcgatttgtaggttagggaaattaagtgatttgttaaatgttttttagttggtagttaaattagaaatagagtttttgttttttgatatttagtttagtattttttttttattatgttgttttttttaatgtaattttattttggagtaaaatggtagaatgatattttagtatatttgggaaaagatatatgaaataagaataagaatgtttatagataatacgatagtatggttagtttttatagtatgttttttgtaaaggtttttttttattagaatgaatttatattgttatagtgttgggtttttatttttagtttgtatttttttattttgttttatattatgttttattattagttggtggttaatttatttttttttttaggattttagattttttattaattataaatttaagttaggatttgttttatttattattgttatttttatttttagtatttagtatattgttttattatttatgtattgtaggaattaattgtttatataaaaatgagtacgttttggaaattagggtcgaaatagggtaaggagtttattttagtgaggaagggttattagtaagtaagtttgagaaaacggcgtggatggatttttatttgttttttcgttttggtttttgtttgttattggaaatatttcgtttttatatggttatttgaggtttttgggtgtttagtcgtttttttgagatattttgatggtttgggggttggattaggggaatgtttgagagttaggtgggagttatttttggtagagttgaaaggggtcgagtttgaaagtgggaggggggaattagtttagtggaatttgaagaattataaaaataaagatggttagttttttaggtagagataattattattttttttgtttggttttattgatttgaaggtggaaatatttttatattatttgaaggttttagattttgtttttagttatttatgtttttttggataagaggagaaataaagatattttaatttaatttttaggttattttttaaagagaaagtttttataataataaagttataatttttgaattatagttaggtttattcgatgtttagttttttttttatttttttaaagtaggagatattttaaatttatttgtttgttttaatttggttttttatggaatttaagtaattaattattaagtggagagaatttattgaaagagatagattgagaggggttttgaggttttatttatatttttaggattttgggtagtgtttttatttttttttttaagtttttatggtttttgttgtttttggttagaggtgagaaaggaggtatatagtgtaggggttttgagcgttatttttagagttttttttatggtttagtaaggtttgagggaagtttatttagatattagtaggttatgatttttgggtttttttttgttaaagtgttggtttaaggtttggttttagttgaatgtggttatatgtagggttagattttttttaagattttgggaatttaggtcgtttagatttttaggtagaaaagttagcgttttgatattttatttaaattttttttgcggttgtttttttagtttttttttattatttttttagtttttatgtttgttgttcgttttttttttttcgagttttaatatatagtgggtatttgaagattttttttttatttttttatttttattaatttattttttattcgaatttgggatttttattttcgtttttttttataatttaatttatttttttttgaaggaattattttggttttgatttttatttttattttttaatagtttgttttcgttttttgtacgttagtcggttttatttttttattattgtttttttagatattcgaggttttatttagttagttcgtgagttttaaggttgttttgatttttttatttgtttttttatttggtttttgtattttttttttttttggattttttgaatttttttaggattttcgtttagttttttttcgtttttaatcgatttttttcgaacgttttttattaatcgcgagagttttttattgcgttttggttatattttttacgtttcgttttcggtttcgtttttgtttttgatcgcgtttgcgtaaggcgggcgttttaaagttttattttattttgttgggaggagggggaaaggtgtacgtaggcgtagtggcgtttaaatttgggtttattaaatgcgtcggagtattttcgcgtttaggcggtttttttttattgcggtaattcgggaaaatttgtgaattaattagaaaaagtggaaggcgggagattttggggcgttgtttaatggcgcggaagagaataaatgagttggttaatcgggaacggtacgggggcgggttcgttcggcgcgaagttcgggttcgggaatttcgaaggaggggtaggcgttgttcgcgcgtagaggtcgcgttttttttggtttcggttttttggttgttaaatagatgtagtaacgtcggtttttgtcgaggagtttaaggggtttcgggattcgtcgtataggttggtattgtttgaagaggaggttattcggagattgcgtcgcgcgggtagattcgaaacggggttggggcggagtgggaaaaggtcgggtatgttttgtatgatcgcggggagtttttttttgtttttattttatttagagaagtcgggaagtaggggtttaggtttaatttgttggagtatttaaggattcgtttgtatttttttttgggggatgatagtggatttattgttttcggaggtttaattagttatgagtgagggattggttagaagatcggggcgtaggtaagtaggagtgttttattaggataagtaagtttgataggaagaagttgttttttttcgaattatatagaggtgatgtgttcgtattgtacgtagacgtgtgtataataggattttttttttcgcgtttcgttatttcgatatatataggagttgtttaaagtatttttgttttgtagattggaggttttttaaatattttgtgatttgaggatttagtttaagtgaggtgttataggacgtgtttttgagtttgtattgtacggagatttttttggaattttttatttgtaagtcggtttaattaattttgtattgagttttaggttgtttgtattttgaatttgggttatttaggtagtgtgtttaaagttgaaatcgtatatagtataatttaagtttgtattagattgggaagcgaatttaagttagcggtgcgtggtttaggagtgggaaaggaaatggatgtttgaagtggaagaggtggtgtagagggggtatcgtttatgttgttttgtttttaattgttgcgtatagggggcggtaggggcggtgatttttatattttttattttttcgtcggggttggttgtatttatcgtttgggttatagggtcgatttgtgtgatgtggttttgcggttttagtaggagtttggttttatttttgggatttacgtcgaattgtatgtcgagtttcggggtgatgattggagggttagtttggaagattatagtagttaaggtgagtattaagtagggtagttttgtttttgggtggttgaagcgttaggttggaatgagtaaggtttttataagattttgttgtttgttttttatatttttattagattggatggatagtcgtggtttagatttttatttttttattagaagtgtgtatagttagaagttttttgttagattgattttttttggtttcgtttagtttatataggatttgggatattattagaaagatattatagtggggatgttttgaggttattagaggttaagtttagatttgatttagtttttagttttgttgaggtattttgtttttgggttagggtagttttatgttgaataatgtttttaataatttgggtatgttttttttcgtgatttgaggtagttagttttagaaagtttagatttatatttgagttttgttattgttttttggtaaagttagttgtaggagtgttatggttattagattatagtagttaatatttatttagtgtttattgttatgagttaggttttattttaagtgtattgaatgtaggtggtattaatattatttttatttatagtaaaggaaaatgaggtataaagaggttaaggaatttgtttagggttgggtatggtggtttatatttataatttagtattttgggaggttaaggtagggtggattatttgagtttaggagttcgagattagtttgggtaatatggtgaaaatttgtttttattaaaaaattaattaattttttaaaaaaagtttgggcgcggtggtttacgtttgtaattttagtattttgggaggtcgagatgggtagattacgaggttaggagttcgagattattttgattaatatgttgaaattttatttgtgttgaaaaaaaaatataaaaattagttaggtgtggtggcgtgtatttgtaattttagttatttaggaggttgaagtagtagaattatttgaattcgggaggcggaggttgtagtgagttgagatcgtattattgtattttagtttgggcgatagagcgagattttattttaaataaataaataaattaaaagtttgtttagggttatataattggtaagtggtagagttaggatttgaacgagttggagttgggggagagtgagtatgtttgaaaattggattttagggcggggtacggtggtttacgtttgtaattttagtattttgggaggttgaggcgggtagattaggaggttaggagtatgagattagtttggttaatatggtaaaattttgtttttgttaaaaataaaaaaattagttagacgtggtggtatatgtttgtaattttagttatttaggaggttgaggtaggagaattgtttgaatttgggaggcggtttaagtttgggtaatagagtaaaattttattttaaaaaaaaaaaaaagaaagaaaaaaaaagaagaaagaaagaaaattggattttaggatagtgagggtagggattttttgtaggaaagtataagaaatatagatttgtttttagttgataaggagtgtattgtttggtatttgttatttgttgaggggtttaggatgtgagggagaatttgattatagttttatatttttttttagaaattatatagatttttttatttttgattttggttatttttgtttttgttttttatatttgtttggtgttttattattaataggtattttggttaataatgttcgatttttaagaggttataggttggaattgagtgatggagattttttgatttttggttttgaagggtttttaggaattagtttttcggagttttattttatgttttaataagtacgagttaagttttaggattttgttgttattattattttacggtttaggggagaagttcgggttggggttggttttcggtttatgttgtttttttagggggttttatagcggttttttagtatttttttttttgtttttaaggttatattgattttaaattttataggtagttttagtaagtttcggttttagttttttatttttttttttagttggggtggattaaagagtttgtttgttttcgttttatttggggaagtggggattacgttttttgttttattttaacgtaatcggaggaaatttgtttatcgagtgttggcggaattggatgatgagagtgagttttttgagaattcgttatcggtttttatggagtttaggaagaaatttcgtgtagataaagttttattgatttttattgggtaagtggagtttttatttggtttttttagtgttttattgtttttcgattttttgtatttttaggttgtgaggaggtttttttgtttggggggatgggtacgggaggtggaatagatggaatggtaagatttgggttagttttgataggaaaagaaaaatatgtgtaggagaatatgagaggtggggtggggtagtgtttataaaataatcggagtgagtatgttttgttttttatatttatatggttttaattttatttttttagtgtttaaggatggggaatttttaggtttatattagaggtttttaggtttattttatgtgtttttaaggatagagtttaggtttattttagtttttagattattgtgtttttgtggttttattttatgattagttatagggtggtaaggtttaggtttttttttataggttttcggtgatttttgtgtttgtgttattttttttagaaatcgacgtggtcgttttcggaagtatttagtgagcgtttttatggttttttttgtagttgggggcggggagttttgtgtagttttttgttgttgtttgttttaggaagagatagtggtttgggtttagtgtgatggttgtgacgtttggttttatgtggtttgtgttggttgtagtatttaggttgttagggaggtcgattttcgatgtttagggtgtcgggttggtatttagatttaaggtttatcgttaaggtattatcggatatatttgtttatgagtagatatagtagcgagtaaataggtttgataaatatttttttttttttttttttttaagagggaatgattatagggaagaaggatggattgatgtggatttatttagggtttggagtagattttggtggttaagatagaagagatggttttttgttaaagatattgttatttttaggaaattgttagtgagttggaagtttttattattataagttataaggttatgttgttatggatattagaatatttgtagttagagtatttattagttgtaaaagttatgtttgtaatcgatggaaaatgtaagagggagtttttaaggtttttggtggtattatttaaggtattttgggaaaatttagggtttggttttaaaatttttttattttgtggttagttttgttgttaataaaatcgtagcgatttggttttttatagttttgtttttatttttaagttaaggataagtcgttttatttatttttgggtatttattttttttgtgggtttgtgatattttttgttttttagggagaatgtgtttggtaaggtttggagaattaatttagaattttaggggaaggggagagatggaaatataaatttgtttattggaaaggtgtaaatatatgggttgagttggaggtaggaatataggtaattaaggtttttagtttaagggaaaatagatttattgttatttaaataaggtaattgggatttggttaagtttataaagatagtagaagatttatttataggttttatttgtattgttagggtaagagaaagtttggtaaattagttatagtagtttattagtgtgatggttgtgatatagttttattttacgggtggatatagtagagggtaattgggttggtttggtttagtgtgaattaaatcgtttaatttatatatggtatatgtgatttttttttgtgagttttatattaagttaaattattgttaaagtattatttttatagaaataaagttttattttgatttgttttattaaaatttgttatattcgtttttttttatttagatttaatgagtttaagtttttttatatggaagaaatgattttggggtaaagatttttaatgaattagtggtagagttaggaataaaatttgagtaattaatgagttatttatgggtagagtatgtaaaaattttaagtggaaattaaatagattttggtattaagaaagtataaagtattaatagaagtttttggttggggtgattaaggtttaatagaaataagatgatttttaagtataaagttatttaagaattttagagtagggtgggaaagtaaaaagttagttttgaataggtaatagttatatggtgattgagtttatgggtaaaagtttttgtattataggtttttgggaattagtttattatagggttttgtataaataaatttggttgtaattttagttttttttttgatgttgtgtgattttaaggagtgtaaatggtattttagttttagggttatttgggtatgagtattggatatttttatttttattttagtaattgaaggataaattaagataagtgtgtttatttattgtgttttaagtttttttatttaagaaaaaagtgatatatgatgtgggattaaaattaagagtattattgaattttattttttttttaattagttgttttaaatttttttgtttttattttttgtgtttttaattttttttttagtgaatgaagaatttaattttaaaaattttggtataaattttaggttttttttttttagttttttttttttttttgttttttatttttagaagggtaggtattttagtttgaatgtatgggagagtttagagtggtgatagagatagggggaaaggttttttttttagggaaagggatcgaggagtatagtgtagtgaagtgagggtttttatagtttggggtattaaaatggggttttggggttagaggaaaggatattggtttttttgagaaaggagatttagtagttttaaaattttttcgttgtgtatagtcgttgtttgatcgtttgtttttttggcgtcggttatagaattatattcggattatttgttagtgaatgatagaaaggagaatgatattagataatgagttgagagacgggtttgattttgtttggatattttatttaaagttaatagttttagagtagttagaggaggatattagagaatgagttgagataggtttgattgtttggatattttgtttaaagttaatagttttagagtagttggaggagttagagttagggaaagcgaggtggtgataggggaaagagatggagttcgtagagagatatggtatttatatttttttcgagtttaagttgttgggcgatgtggttgatttgttgtagtgtgggtttcgggtattgtaggaataaattttttaggttgttttttattcggttttcgatattggttcgttttttttttcgggtttgtacgagggtttttgttttgtatatttgtgtaggtgggaagggggtgataagggtaagttttggatttgttgagtaatagtattataggggtttgtgattagatgtgttagtagagttaggtggtggtgtgaaaaggtaggattttggaagggttggttttggattttattttagtagaattgaggaattttattttattttattgagaattattgtattaaagacggagagttacgagttagtgatggaagtaatggaaattaggttaagaaagggaaggttttcgggtattttttttttatttttattttttgaagatttttattgttgttagttttttttatttatttttgtagtaagggtcgtagtttatatatgtttttgaagttaagttgtagagttttaaagcggtagatggtcgtttggttgaatattttttttgggggaggttagttaaaagagaagtaaaatgagggagtacgtagggtttttgtgattttgagatttaagtttattatttttttttagagggagtttaaagtttaagtattttttttttttttttatttttttttatgggtgagggtagagtttgtttttgtttttttttattaggtttagggatattttttagaggggagatgcggttagaatttgtagaggggaatttattaaatagaatttttagggtgagttttatatcggtttgtgtatattttagggtgatttttttttgttttaggagtttggtaaattgttcgagttttttttgtagagttttgatgttttgggattggattttaaaaggtagaagatttgtaagaatataaatatattagttattaattttttttttttattcgggatttaagaatttacgtgtggttttaaggaatagtttgtagaagtgtatttgttttttaagttgtttatttaatttttagaaataatttatttataaatgttatttatttattttttgtttattgatttatgtatgtaataaaggattattttttttttagaaattggtatatttaagggatgtagagtatggtgaaaggatagaaagagagattttggtttcgagggagaatatttgttaggttatgaaggttagaagttttttgttgggcgcggtggtttatgtttataattttagtattttgggaggtcgaggtgggtagattacgaggttaggagtttaagattagtatggttaatatggtgaaatttcgtttttattaaaaatataaaaattagttgggtacggtggtacgtatttgtaattttagttatttaggaggttgaggtaggagaattatttgaattcgggaggcggaggttgtagtgagttgagattacgttattgtattttagtttgggtgatagagtaagattttgttttaaagaaaaaaaaaaagaagatagtttatttaatatttgtaaaatttttttatttaagtattatttttagtttaaggatgttttgagattagagaaatagataagttgttaagttttgggttaattaaaaaggaagagtattatgttttagaagttaaatttagtatatattttttttagtttgttttgagggttttataaattataatatggtatgtatatatataaatatagtaaaaaagtaataggtgttataagaatggataaagtgttttgtgtgtatttattttttattttttaaattgattattttttatttttattgtattttttttattatagaggtattttaattgatttttaaatttaagagatttatcgagtattttttataagttagcggttatataaagtggataaagagttttgatatttagtatgatagaagtgttattcggtatttgttttttaagttgtttatttggattttttttaagtgtattttttttttttttttgttttataattttttaataataaatttttatttttgttttgaaaaataaaaaagtaaataaaataaaaaatggttaggtatagtggtttatgtttgtaaattttagtattttgggaggttaaggtgggtagattgtttgagtttaagagttagaaagtagtttgggtaatatagtgagattcgtgtcgtttttttttttatttttgttgtttttatttaaaaaatatatatatattatggaaaaaagtaaagtagttcgggcgtagtggttatgtttgtaatttttttattttgggaggttaaggtgggtagattatttgaggttaggagtttgagattagtttggttaatatagtgagattttgtttttattaaaaatataaaaattagttgggtattatggcgtttttttataattttagttatttaggaggttggggtaggagaattgtttgaatttaggaggtggagtttgtagtgagttaagatcgtattattgtattttagtttgagggatagagtgagattttattttaaaaattaaaaaaaaaataaagtagtttataggagtagggtaaaggagggaaggagattatggaggagggtgatatttttaaagatagagaaggtgattgtttgagtaaaggataagagtttaatgtggtaaggttttgaagtgggttttttagagtttaaagttggtttggtggttaggtagattttgttgtagatatagtgattttgttttagtttaagtgaaatgattttttattttttttttttttttttaagacggaatttcgttttatcgtttaggttggagtgttgtggcgtgattttggtttattgtaattttcgttttttgggtttaagttattttgttttagtcgtttgagtagttgggattataggtatttattattatgttcggttaatttttgtatttttagtagatatggggttttattatgttggttaggttggttaggagattttaagtgatttgtttattttggttttttaaagtgttgggattataggtgtgaattatcgtatttagttttatttttttttttttttttttgagagtttcgtttttgttgtttaggttggagtgtattggcgcgatttcggtttatcgtaatttatattttttaggtttaagcgatttttttgttttagttttttgagtagttgagattataggtatgcgttattacgtttagttaattttgtatttttagtagagatggggtttcgttatgttggttaggttggattcgaatttttaattttaggtgattcgtttgtttcggttttttaaagtgtttggttatattttttaaaatattgattttagttgacgtgttggttatagatagtagggaggaagtagtataatttgagaagttattgcggtaattttagtagagatgatggtggttgaggttagggttaggttgtgattgatttaggatgttttttaaggataggatgtaggacgtgaaagaaattgaggatgattgggtttggttttgagtaattgggtgattagggtggagtagtttagggagttattataagagatagaaaacgcggtagttatttggtgtttaaatggtatttaagttttgagggtgggtgagaggaaggaagggtagatagagtagaggttgaaggattgagttttggggtatgttatatgaggttgtcggcggatagaggtgtatagttagtgagaaaaaaataaggtttttttgtagttttgaagttttaaggaagtgttttaatggtgtttgattatattaattttaaataggttgtttttatttttaatttttgtttagttaataatttaaattgataaatgttttttgttattttggattttttaaattttgttttggggttttggaataaatattggtttaaattttcgttttattatttagtagttaaaattcgttaaataggataataatatttttttttaggagattttgtgttggttaatgagataatgatgtataaacggagtatatagttaggtatttaggaagtggattataattgttagttattattatttaaggtttagtagtgattttttgcgaagaggttggggtttttcggttattttagaaattagttatatttttttgtgaggttttaaggtttagtatttaatttttaattgtttatatttgtcgttttggaggattggaagatatatttttaatagtttttagtagggttggatgtttttaatttcgtagtagttttatatttgtaaatggtttggagaaattttttattattttttttgtttataattttggaattgaggttgaagttaattaaaatttagttttttataaggggtgttagggtgtgtattttaatatagtggttagttattggtttgaggtagagattcggggaagataagttttatatttgattggaggtaaatttagtttataacgcgtatatatatagtttaaataggagattttattagaaacgagttatattttaaatttttaggaataataattttggaatgagtattgtttttatttttaggttatgtttaattttaaggttaaaattttgggtttgataagggttaaatttttaagtaggattaagggtgggaaaaggggtttaaattaattttaagttgggtttggtgttgggttagtaatgagtgattagattttgggtaggtttaggagatgtgagagattttgataagggttgggttagatagagtaaaggttagtttgggttagttttcgatttttttaggtcgttttgtttttatttgtagttgttttttcgaaatttagtttttagtttttatttggtttttgtttgttagggttgtttgtagttgatatatatttttttttggttagggtagttgattttgtttgttttttttttgggtgttaggtttgggtagttgtaggtgattatttttttattaggttgttttgttatgattatttttttatattttaatttcgtcgaagtttatttgtttttttcgggttttgttttagtttttttttttttagttttacggtattaggggtgacggtgtagggtttcggggaggttttatcggagttgttttttatttcgatttttgtttcgtttttaggttgagaggtttttaagtcgttttggggtattagttttattttaatttggggtttatagtacgttatttttttatagaatttatacggcggggggtatgggggaattttttatattttagagtttggtttaattttcggttcgatttttggttttttaggagggttttggaagtttagttaggttcgaggattaatttagttcggtttcggtttttttggtttattatttttattatttggagggggcgagaaggtaaaatttgaagttaggtgtttcgttatggggaaggaaggcgttttaagtcgggggtttggtgaaatgagggtttgcgaagggattatttaatttttttttttttttttagttttatttattagttttgatttttggtttcgttttttggatgggtggaggagagggaggtggggggagaaattgaggcgaaggatgtttgtttaatggtggtggtaatggtgtttgtggaaggggaaaatcgggagatataattggcgtttttttaggattttagtgtaggttttttatagaaattttttttatttttattttttaagatagggttttattttgttgtttagattggagtgtagtggagtataatgatggtttaatgtagtttcgatttattgggttaaagtaatttttttgttttagttttttaagtggttgggattataggtttggattattgtgttttgttagtttttttatttttagtagagatggggttttgttatgttatttaggttggttttgaatttttgtttttaagaaattttttcgtttttgtcgtttagtgttatgattaaaggcgtgagttattatatttaatttttaatttttaattcgttttttggtatttttttaggttttgtatattttagttgtttggaattatttttatatttttatgttttttaggaatttaggtgtttgattttttttttatagatttttggtattgtgtttttaggggttagttatttttttagttttttaaatttattgaatgtgtgtgtggcgttattttttaatgtattaatagttataagtataatggttagttgtttttttatgttttttttcgatttatttagaattttaggtatttttatttcgatattggttaaatttagttatttcgtagtttgggtgtttggtattatttgtttagtttgttaaattttattttatttttaagagtagattgttagataaggttttcgtgttatatttttttattttttatttttttattttttcgttttttagaattagattttagattttttttatttaatagattaaggggttggtttttattttttttttaagggattagattttggattgattgggttttagttttttaatttttgttgaaatagagtgataagatattcgttttgggttttttttattatggaatttgtatattaggttttttgttttttttttaattaaaatttagatatttaatattacggtaggtttcgtttttttttttttatttttttggtttaggtttttagttttaggttttgggtggggaaaattagggggtggggggtgtggagaaaaaatatttgattttaggtttaaagaagtttgggagggattgggggaagggggtaggataatggttttggttggataatttcggtttttagagggggtagttttaattttaaataagtgtttaatttttgaatgggtttggatggtttttttggggattgttttttgttttttaattttttagttttaatttttttatatagaattttttttagagacgttaaaaggagttttagtaatttttttttgtaatttttttaaagattgagttttagacgggtattaagggttttttatagggatttaggtatttagttttttttttttttgggggatttaggcgtttagttttatcgtgtattttttttcgagttcggaagattgagggatgtgttttgtttagtggggttggttggtagaaagacgtagaggaggtggcgagtgatttgtggaggggtgtaggaaggttgttttaagtttttttttagggtttgtttttttgggtttggtttgagtattttgaggtttatgttgttggtttagtgtttgattttgtttgtaagagaatagttaacggaatgtttgtttgtgagggatgatgtttgtttgtttgtttttaaaatttgattttagtggagggtttggggtaagtttgggggttttagagggggttttgggttagggttttttatagtttcgaaggttagaaggttaggtttggattgggtacgttgatttttgtcgatttaagtaaggttttttattgtaggttttaggtttagttttgtttgggtttgtttgttggggttagtggttttgtttgttttttaaggggatgggtgtttcgtggttagttgtttttattttggtggtattcgtgagttttttgagattttttttttatttttatgttgtttttgttcgtgtgtttattttttgtttgtgtagattttttgagtttaattgtatgcgtgtattttaatatttgttataggtttgtcggaaggtttataaggtagtggggttgtagttgtgtttatttttcggtttttaattgtttaaaaggtaggtagattatggggtttggtgggggtgggaggaatatgtttcggaataggaggaggtttttttttagttattttaatttttaggatagaattattacggtatttttgttatgtatttttttgttgtttgttaagaagacggttttttagaggagggggaggggtaggtttgggatttggttggaatttttatattagtgttttttagtttgttattttttaggttttttaaaagcgttttttttaagttagtttagagagtttttgttgtttatttttttagtggtttttaaaatattttttttaatttttttatttaatattatttttttgtttttagattataatttgtattgtaggtggtgtatttttggtttgggtaagaggtttattttcgagagggacgtagataaggggtgggtgtttgggtttttggttgttttgtggttggatatgagtttagttaggggttagttttttgtatgtttagatttttagtcggtttttttttggggtgtttagggttgatgggaggttgaggtaggtttttttttttttttattgttttgttatgtttgaagggtaggtggttttattttagttaaggttagtttttttaggttttaattagtgttgggggttatcgttgggtttggaggagattggaagttaggttgagttattagaattggttttatgattttttgggttttagaaagttattataaaaagatattttatatatatttttattattatagtgtaatgttaagattttttatagagtattgttaggggatttaggtgaggtttatttttttttattaggtgtggcggttggtatggttgggtggggagaggtgagatgagtagttttgttgtttttagtttagtttttttttttttttattgggagatgaggtgttgtttggttgaaaaattagttgaaaaaatttagttgggattaatagagatttgttttcgattcggtttaggaaattatttattttgattttcgaggtttgttaatttgaaggtaaaagaaagggaagaaatggagggttgagggtttaggtttggtttattttgggagatgattttttttaatagtaatttagataaatttttttgtttattgtggattaagttttttttttttaataaaggattttttgattttttttatgagatttgtaaattgaggttattttattttaaatttagatatttttattttaaatagaggagttaattttttagttgtagtttgtagggagttagaggtgagagtaaaaggagtgggtgagttgggaggattggttaggaataaattaggaggtatggattaggttttaagttttggttttgattttttggttaatggtattttttttttttgtgttttagtttttttatttagtaaagaggatttggatttaatgaattttaaatttttttttaattaagatataaaattgttgtttcgtttttatatgtttttttatttatttattttatttatttgatatgggaatgtagatttttttgtatatttgtgaagagaaatgggggtaggaaagttgggagtggtgtttaatgagaagttggtataggtttttttgtattttgttatttatttttaagtattttttttggggaatttggtaggtttttttttgaagtttgattaagagatataggaggaggtcgggagcggtggtttatgtttataattttagtattttaggaggttgaggcgggcggattattttagattagtagttcgagattagtttggttaatatggtgaaattttgtttttattaaaaatattaaaaggtggtttttttgtttgtttgttttgttttttttgtatgtggtggtgtatgtttgtaattttagttatttaggaggttgagaaataaaaatcgtttgaatttaggtagtagagggtgtagtgagttgagatcgagttattgtattcggtaattgtattgttatatgtttttaaattttagttgtttatttgaggttgtatagagatttagtattagtttggtgtattattagataggagagtttatgtttacgttaaagggattatagtagattgttggttttgggtatttgagtagcgttatgtaagggggtaagtggtttagggttttagggatttaggggttggggtagtttattttttagttaagttagttggatattggaggatagaagttaagggtttagtatgttgggatggtttttttttaggggttttgtagagagttttatgtattaagggggttagcgggatagggaaaagtggtggtaaagattttttagataaattggttgtttttggttttattaagttgtcgtatattttttatattagggttttaggtattattttattgtgttttatggtgattgtaggtgatgttttattttgagagtttttgggtgtttagttttgggttagaatttgaatattaagtgggaaaagggttgattaagtacgggagagggaaggaaagtagagtggttaggacggttagtaatagagttgtgtttatttaggatatgggtattgaaatggagttttgaaggttggttgaggggtttgtattttattttttttatagtgtttttagtttttttattttttttatatgaattagttcgtatttattatatttacggtgggtcgtggttttattttagtttttaggtattttcggagagggtagacgtagttttaggttaggaaggattgttttttttttttttttttttttgtagttttgtttggttttggttggtttttgttggagttgaaagatttaagtgtgttaagaagggagttttggttattatagttgtagtgttagtgtttttagttgtttcggttttttaataatttatagataatcgtggtttggagggtgtgtgattttgaaaagttaaaattttagaattttaaagttataagaggttaaaatagtggttttttttattttcgtttttatttttttttaaaatgtatgaaatttttttgttttgattgataaatttttatttattttttaagatatattttttttgttaattatatttttattaaagttatattgtattcgtttttttttttttgtagtatgtggtttttttttatgtatttagtatgtattgtttagttatatatatttatttatttttttgaaggtttagtatagatagtattgtgtttaaatttttgatttatatattagttattggttatatgtttacggtaaatgtaatggaatttttttaagttttgttttttttatttggtaattggatataattatagtttttattatataagtaaagataatatgagataatttttgttagtgttaatgtaggatttattaagaagaatttaagaattagtagttgttattgtaaggtgtattattggtaatagtaaaatgaatagtatttattaggtttaaatgtttgttagatgaaaaaaaatgatattggttagaaatatattttttttaggttattaggttttttattaattattggtggtggcgagagaggtgaatgttagaaaaaggttagttttttttattttttggatttgagaaagttggataaattttttttatttggtcgggtgcggtggtttacgtttgtaattttagtattttgggaggtttaggtaggtggattacgaggttaggagtttgagattagtttggttaatatggtgaaattttatttttattaaaaatataaaaattagttaggtgtggtggtaggcgtttgtaattttagttatttaggaggttgaggtaggggaatcgtttgaatttgggaggcggagtttgtagtgggttgagatcgggttattgtattttagtttgggtaataagagtaaaaaaataatagattttttttatttgaagggaaggtttgggagtttaaggataatggttttttttttagagatttagtttttgattgagggaaagggtgagggttttatatttttttttttttttttttttattgagatagagttttgttttgttatttaggttggagtgtagtggtacgatttcggtttattgtaagttttatttttcgggtttatgttatttttttgttttagtttttcgagtagttgggattataggtgtttgttagcgtattcggttaattttttttgtatttttagtagagatagggttttattgtgttagttaggatggtttcgattttttgattttgtgatttatttgtttcggttttttaaattgttgggattataggtatgagttatcgcgtttagttagagggttttatatttttgttttatttttgttaatatttaagatttagtttttttggtattattgggtatataaaataaggtttgagttagggatgaatttttttaggtaggaggagatagtattaggattttagtgaagtgggatggtatttgagtgtttagtatagtgttttacgtagagtttaatgtattttagttgaataataacgaatgtagttgtatatttttaggtttatattgagttttttttttttttttgtttttttttgagtttttaagtttaattattttggttttggttgttgtgtgttatgatgttttttaggatggtgataaggtgttgggttttggtttttagtttgagaattagttttttttaagtttttgggtttttggtttgagtttaggatgtacggggttttgttatttgttttttttgtagtattataagaaagggtggttatttaggtagtttgagatttcgtaaggggtttgttagggttgggttgggaaagagtaatgaagttatagtatagagagtgggttgttgaggaaaagagaatgatgggaaagggttattttttaataggagttttatttgggagatattgtataaggtgtttgtgtggtgaggttgtgtgattatttttgagggtattaaaggagtgggtaaggggaatgtagattgaataatgggaagggaattttttgtttttttgtagggttttatttaggtttattgttttaaatagtaatgatttttaaatttttttatttttgttttttatattggtatatttaattatttatttgttggttatttggatttaaggttttatatggttttaaatttgatatatttaaaattgagtatttttttttggttttggttatggaataatttgttttttattttatatttttggtgagtggtattatttttttatttgtttgtttatttaagttagaattgggttgaggtgtgggtaattatcggatgttatgtagttttttggtataatagtatgaagtgagttgagaggttatggaataaaaaggtttatagattaaatgtaaatgtttaaataatatcgtttattaaataaatgtaaaatatattttgagaagtaggaggtaggtgttggggtgggttaatatacgggagagggggtaagttgggtggaatgattatattagttgaattgtgggttatgtagtgtgtatttattttgttaaattgaaattttttgtattttgagtgttttatgttttacgtatttagggtatcgtgaatatttagtgtttttttggtttttttgttttttttgatttttgtatatacgaatatgttgtattatttatagatgattaatttagttatttatgtgtaatattttttttgagtttattgtttttttgttttttatagtagaattggatatttttaaataatcggtaagtttggtgtttattttagagtgttgtttttttttatattttttagttttaaatagttagtaagttttgtttatttttaattttttgtttttttaatttggatatttttttatttttattaaattagtttatagtatggtttgtttggattatagttagagtttttttaattggtttttttttttttagttttaagtatataaaatttgttttttttgatataattagagtgatttatttagaaatatatattagatcgtatatttttttgttttttttttaaggattttttttttgttttcgggatggtttttaagttttttagtaagttaaataaggttttttgaaggttgtcgtttttatttttattttttattatattttgtttttatttgatttatttggaataggaaggttggagtatttttatatttttgtagttttattttttagtgtttttttgagatggttttttgaagggaagatttattttttttttttttaaatattatttaaattatttaaatttttttattaaatttttattttggttttaaattatttattacgttgttgtatttttttattttagagacggttttgatttttatttagaggtgatatttattttattatttgtttatggttgtgtattttttttggggttattttttgtggataagaatatgagttatattttttatatatgagaaaattatattaattttagaggattagaggttatgttaaaaaatatatttggtagttatgtttaaatatatttttaaggttgggttaaaaattacgatgaggcgaaattttatttttattaaaaaaatataaaaattagttgggtttggtggtgtacgtttgtaattttagttatttaggaggttgagataggagaatttttagaatttaggaggcggaggttgtagtgagtcgagattgtattattgtattttagtttgggcgattgagtgatttttcgtttttaaatatatatatatatatatatatatacgtatatatatgtgtatatatatatatatatttttttttttttaataaatatagttgttattattggtttttttttttttttttttcgagacggttttattttgttatttatattgaagtgtagtggtataattatgaggtttattttaatttttgttttttaggtttaagcgatttttttattttagtttttagagtaattgggattataggcgtgtattattacgtttggttaatgtttttgtattttttgtattgataggttttttttatgttttttgggttggttttaaatttttgtgtttaagtaatttttcgtttagttcggttttttaaagttttgggattataggtataaggattttttacggttaagtttaagttttaagtgggagatatgggataattatttattagatataattagttttagaggaagttttatttattttttaagtttgattttattttgtaatttttatcgttttagatttttttcggttttaaaaagtatttttaagaggttttataaaggttatagtttggggaaggttatggtttaggggaaggggagaggtgttaaataattaagtttttttattatttagtattcgcgtgaggtatcgttaggtatcgttaggtttttagtggtggtggtggtatcgggttttaattttttcggagggttggattttcgttgttaggttgtggggattaggcgttgtgggggagggggatatttaataggtatggagggcggagtagagtttcgtagttattggtttgattttcggaacgaatcgtcgttagtaagtatagtagtaggattagggggatgtaagagcgggggcggtcggggatcgtgtttttcgtttaggtttagatttcggtaattaggtcggcggaattacgtgttatgttttaggttagcgtagtttcgtttattttttagttgagcgtatcgggaggtttttattggattggagttgttacggaggcgggatttttttttttttttgaattttattgggttaagtttagttcgagataagcgtttttttttagtagtgggaggggtgatttggtttatttatatttaggaatttggggtttgaggtcgggtgcggtggtttacgtttgtaattttagtattttggggggtcgaggcgggcggattataaggttaggagatcgagattattttggttaatattatgaaatttcgtttttattaaaaaaatataaaaaaattagtcgggtgtggtggcgggtatttgtagttttagttattcgggaggttgaggtaggagaatggcgtgaacgttggaggtagagtttgtagtgagtagagatcgcgttattgtattttagtttgggcgatagagtaagatttcgtttttttaaaaaaataatttggggtttgagattcggcgcggtggtttacgtttgtaattttagtataattttagtattttgtggggggtcgaagcgggcggattatttgaggttaggagttggagattagtttggttaatatagcgaaattttggcgcgtatttgtaaatttagtttttcgggagattgaggaaggagaatcgtttgaattcgggaggcggaggttgtagtgagtcgatatagttagcgttattgtattttagtttgggcgatagagtgagatttcgttttaaaaaaagagagagaatttgaggtttaagttgtttttttttggtcgttgtgtagtcgagtgtttttatgtttagatttttttttgtttattttatttatttaatttattatttatttatttatttatattttttgatatggagttttatttttgttgtataggttggagtgtaatggcgcgatttcggtttattataattttcgttttttaggtttaagtaatttttttgatttagtttttttagtagttgggattataggtgtttgttattatattttattaattttttgtatttttagtagagatggggtgtgtgtatatatatatatatatatatatatatatatatatatatagtaagtagttaagagttagtttattttgatagatagtattttttattagagttttttgtcgggtaagaatagttaaggtttgacgggttttattagtaataatttttaaatagtttgtaattatatgattcggttgagtatgtagatgggggttcgatatttttatgagttattttgtgtttaagtggtaggtttatagtattatataatttttttaggaggttatttattatttttttaattatttatggttatgtttcgtttttcgtaggaagtatagattgggaagtttagaagtttatttgtttttatgggtagtaagaagaaagatggtttaatggtgttaattatatagttatttgtttattgattagggagtttagtataagttttgcgtataattcggtgggggttgtttagtttcggtggagttttgggtgggtttaaatagtttgtaattttggaaatttattgaatggatttttttttgtgtaattggaattttattatgtaattttttgtggtattattatatagtttttgtttaagataattaagtcgttaaataggattttttttattttttttttaagtagtttaaatgatataagattagtattgatatattttatataaatataatttttgatagatatatttattttttttttattgtgttattttttttttttaatttagagaatcgtattttattttatgttgtttattattaatagcggtataagtattaaattttaaggttatatttttgggggtttttttttttttcgttttagttattattttatttgtgttatttagaaaaggattagtttttaattttattttaaaaattgtgattacgggaggtttaaaatgggttataatatatattaggttggttattttttgggttatatattttggatagtattatataaataagttttttttagagttttggtatatttataataattataaaataataggattgtagtaatttttgttttattttagtgatttgatgtatatattggaaatagtttttaatttgaggaaggttagttgaagtttttattgtataagtttaaattttaaggaaaatgagtttcgtaatgagtttttttatgtttcgtttgtgcgtggattagttagtttttgggtgtgattggagtagggtttgtttttttttttagagttattttgtaggggttggtaaagtcgtttttatttacgtatagtttttagtttattgatgtttaagggtggtttcggaggttaggtttattagaataaattgagtttagtatttttaaatagttatgtttaattgggttttttgttattaggagtaaggtggttgggttagggtgttggaaattttaatggttttgtggggatttttatagagtaaggtttggtatttagttagtttagtatttattagttaatgatgttttttggtatttattaaagttattatagtatggggagattttttgtttaggttttgtttaagagttagtttatttgttttttgtgttaatagggtagttgttgttagggtttttggatatgggggttagtttttggaaatttcgtttagttgttttgagagataggtttttggttttgattagggttttatagtttgggttaaaattttaattgttattttttttttttttgatatatagagtgtaaagagttttgttaggttaggtagttttagggttggggtcgatatgagtttttttttttaattaatgaaaagttttttgttgttggttgtaatagatgtagtttatttaatttatatttttgttgattgttatttattaaaatattgatttaaattttgtaattatttgattttaagttttaaattgatttggtattttttgtggggttttaattgtatttaagtagatgtgagaattgaaagatttataaggggtttttttcgttttatgatgttttatttttttttttttttggttgatgaaatgttagggtgaaagggatagttaaatggattaaagtataagtgttattttagttatttagtagagtgtttagtaaaggtttatttcgatattattatatattttttcggggatgaataagggttgattgattgataagtttttggaaatttttaagtttattgtatttttttaggtttttaaggaatgttaaattttttttttgtcgtgagagataagaagtgaatttagtgttgggagatggaagttggatggttttcgggggttgatttatagagatttcgggatatagtagagagagtttggtatgatttattattttaggttgtagaattttggaaaagagttattatgtagtttatatttggtcgattggaggattattttagtggaagagggataattagggttttggtttgttatgtgtataagtataataattgattttgtttaacgtgtagatggaatatttaatttattttaattaggtatttgtattttggtatgttgttttaattgttaaagtttgttttaagtttttaatttttatgattttttagtaaaatgaatgttttttttagtatttatttttattagtttttagattaaagaaagttaaatattattttatatttaataatgttttttgtatgatttttatattaggtaagttaaattttatttttatattagtgtgttattaatgttaaatttaattttaataaaattttgtagatatatttatttaattttttatgtttgattataaggtaaggttttatagattttttttaattttttataatttttgttaaagagtaggttgatgttttaagaaaaatttgttatatttttattttaatgtttagtttatagaaaaattggatgatatttttttaattttagttaatatgtttatatatagaattttttttataattaatattttaaaatttgtttatatttttaaaataataatttttttaattttttaatgtaggtaaaaatttatatttttatgtttttttataatttttttattaaaggtatattttattttttttatatattttgtatataaattgttttttttttttaaatagtatttaggaggttttattatttttaaattatataatattttttgtataaatttttttataaaatttttttttttacgattttcgtcgataattttttaatatgttttaattttttgatttattataaatatttttttttttttaaataattagttaatttattttaggataagaatttattatataatattttttttatataaattttgtttttttcgtttttttttttaaagtgaattttttttttgtttttggattagatcgtttaaggttataagattagaagttattataatatatgttatattgttaatttttagtaaattttatttttgttgaaaattttgtaagtttgggattttaattattttttgttattaataagattttgtttagtttaaattaatttagaattggtatagatggtttttttttttttttgttggtttttttttgtttttgttagatgtttatgttattgtttttttaattattgtagggggaagggggtttaaaattagttgtaattgtttatgtatagaaattggtttggatgttttggtttataggttattttgtgttatatttttgaaataagggatttgtttaggtttttttttgatggttaatttatttttaatgttggttagtttattttataagttttaagtttttttggtgttatagtaatatcgtaattttttttaaatttttttttgaaaaaaaaatttttttaatatagtttttagtggggtgggtttatttgtgtttgatttatgttttttcgagataaaatattacgtttatattatacgtgtattataaaataaaaaaatagggtatatatatttttgtagtttatattaaattaaaattagagtatttaaaaatttaagttaggttaaaattaaaattaaaattaaagtattatataatttaagttaagttaaaattagaataaaagtgttagtataggtatattatgggtgattaggttatgtttttatttagatggagtggggtaagttttaaagattagttttattaagttttagatgttcggattttaagtgttagtttttttttagtgtttagttagtgtgttaatttttttcgggggtttgttacgtgttgttttggcgaggcgttttattcggggaattttttattcgggagcgttttttggatcgcgttatttaggttggttagagtttatcgtagggatgttttatagggtaggtttaagttatttaaggggttgttttggtcgttcgttagttatttcgttttttgtttagggaattaagaaatgtagtaggacgagttttagataaaattttttagatatcgagttgtagaaggaagggttttatttagttgcgagtatcggtaagttattgttttaaaatttaaattttttgaatgtataatttttgttttttttaaggttttataatattaaagattttatatgaaagtgtcgtgattgatttgagtacgtaggtggtacgtgataggggttgtatgtattggtggttagagagaaatagaatagggtagggagtgttataatgtttttttatataatgtttggaaattaggaataatatcgcgttttaagttatgggttgatttttaattattgggtttaggttaggtaggtttaggtttggttttgggtttggcgttaggttgtttgtttttggttttatttttttgtttttttttaaaatagatattgagtataaagtaatataaaataatacgaaagggtttttttttttttttaaagggaataggttgttgtggagaaaggtaaataaatggtggaaagaattatatgggggattaattaatttgtatattaaatttttacgataggtaatttatttttataataaatttgtttatgtaaaaggtttttggtcgggtatggtggtttacgtttgtaattttagtattttgggaggttgaggtgggtggattatttgaggttagtagtttaagataagtttggttaatatggtgaaattttatttttattaaaaatacgaaaattagttgggtatggtggtacgtattcgtagttttagttattcgggaggttgaggaaagggaatggtttgaatttgggagggggaggttgtagtgagtcgagattatgttattgtattttaggttgggtgatagagtgagattgtgttttaaaaaaaaaaaaaaaaaaaagtaaaaagtttttaaaagaaaatagtggaaagatagagattttagaagagggagaaggtttaaggtaatttttttttttttttttttttattatttttttagttattgtggagagagggagagtacggggtgtagggtagatgagagtagataattttgattatttgaggagggtttgtggtttaggaagtgagttttttatcgattttatttatttattttgagacggagttttattttgttatttaggttggagtgagattttagtttattgtaatttttatttttcgggtttaagtgatttttttgttttagttttacgagtagttgggattataggtatgtattattatgtttggttaattttttgtatttttagtagagatggggattttattatgttggttaggttggttttaaatttttgattttaggtgatttgtttatttcggttttttagagtgttgggattataggcgtgagtttcgtatttggtttaaaaatttttatattaagtttaggggtatatgagtaggtttgttatagagataaattttttgttataggggtttagtgtatagattagttaattttttttgtaattttttttattatttatttatttttttttatagtagtttatttatttaataataaattgagtgtttattatgtgttaagaattggagataaggatatgagtaaggaattttatttatttttagtttttatagtatatatttattttgttttttttttttttggtttagtttgagtgtttagtaggtgttttaagttatttattacgtatttattttgcgaaagttgtttgtgtagtttgtttatttttttttttggaattttagtatttttttttttttttttgagacggagttttgttttgttgtttaggttagagtttagtggtgtgatttcggtttattgtaagttttgtttttcgggtttatgttatttttttgttttagtttttcgagtagttgggattatgggtgtttgttattacgtttggttaatttttttgtatttttagtagagacggggttttattatgttagttaggatggtttcgattttttgattttgtgattcgtttgttttagttttttaaagtgttgggattataggtttgagttatcgtgttcggtgtgttttgttaattttttgtattttttttttttgagatagagtttcgttttgtcgtttaggttggagtgtaatggtgtgatttggtttattgtaatttttatttttcgggtttaagtgatttttttgttttagttttttaggtagttgggattataggtatgtgttattacgtttagttaattttttgtatttttagtagagatggggttttattgtgttagttaggatagtttcgattttttgatttcgtggtttattggtttatttgttttggttttttaaagtataggaattataagcgtgagttattatatttagttaattttttgtatttttaatagagatgaggttgtattatgttggttaggttggttttgaatttttgattttaggtgatttttttatttcggttttttaaaatgttgagattataggtgtgagttattatatttggtttaattattttatttattattattattatttttgagacggagttttgtttttgttgtttaggttggagtgtaatggtataattttagtttatcgtaatttttgttttttgggtttaagtgatttttttgttttagttttttgagtagttgggattataaatttttgttattattttcggttaattttgtatttttggtagagatagggtttttttatgtgggttaggttagttttaaatttttgattttaggtgattcgtttatttcggttttttaaagtgttgggattataggtatgagttatagttttcggtattttttattattaatattaaaatatttttgtttaattaatttatttatttttaaaattattattattattttttttattttaagttttaggatatatgtgtagaatgtgtaggtttgttatataagtatatatgtgttatggtgatttttgtatttattaatttgttatttaggttttaagtttcgtttgtattgggtatttgttttaatgttttttttttttttgtttttaattttattttatttttttgagatagagtttttttttattgtttaggttggagtgtagtggtgtgattttagtttattgtaatttttattttttagggttaagcgattttttttttttagttttttgagtagttgggattataggtatatattatatatttggatgatttttgtatttgtttgtagagatagggtttcgttaggttggttttaaatttttgattttaagtgatttatttattttggttttttaaaatgttgggattataggcgtgagatatcgtgtttagtaaaaatatttttattttaaaatttattaaatttattaaaattttattttaaaattttattatttataaaaagtgaaatgattagatttttagtaaatttattaatgaattttgataagtatatgttatttatatttttgttaagatatagaaagttttttttgttttttttgattttgttttatttttgagtagttatggatttgatgattattattatagagtagttttttttaatttttttttttttttgagatggagttttattttgttatttaggttggagtgtaatggtacgatttcggtttattgtaatttttgttttttgggtttaagagatttttttgttttagttttttgagtagttgggagtataggtgtgagttattatgattggttaattttgtatttttagtagagatggggtttcgttatgtttattaggttggttttaaatttttgattttaggtgatttattcgtttcggttttttaaagtgttgggattataggtgtgagttattgtgttgggttgtttgttttaaaattttttataaatgtatgtataggtatggttttttttgtgtttggttttttgtatttggtataatatttatgtaatttatttatgttgttgtatttattagtagtttattttttttttaaaaaaaatttttttttttaaattttgagatagttttattgttttaggttgtagtgtagtggtgagattttaggttattgtaatttttattttttaggtataagtattttttttgttttagttttttgagtagttggaattataggtgtgtgtattattacgtttggttaatttttgtatttttagtatagatgggattttttagttattttagaggttgaggtaggagaattatttgaatttagaaggtagaggttgtagtaagtcgagatcgtattattgtattttagtttgggcggtaagagtgaaattttgttttaaaaaaaagttaggtgttgtggtttatatttgtggttttagttagtggggagtttaagagtttaagtttttagtgagtggtagttatattagtatattttagtttgggtgatagagtgaaattttgttttagaaagaaaaaaaaaataagatgaaggaaagtatatgtagtttgttaaaatttatgtggaaagagggaaattatatgtatatatatatatatttatatttgtttgtatatgtataaaacgtttaagtttgtttggtttttttgggatagaatttgattgttatttaggttggagtgtaatggtgtaattttagtttattgtaattttcgtttttcgggtttaagtgatttttttgttttagttttttaagtagttggattatagttttttgttattatgtttattaatgttttgtatttttagtagagatagggttttgttatgttttttaggttagtttcgaattttttattttaggtgattcgttcgtttcggttttttaaagtgttggaattataggcgtgggttattaagttcgaataaatgttttaagtttgttttttttttttttttaattaattaatttatttatttatttttcgagacggagttttgtttttgtcgtttaggttggagtgtaatggtaagatttcggtttattgtaatttttgtttttcgggtttaagtgatttttttgttttagttttttaagtagttgggattatagatgtttattattatattcgattaatttttgtatttttagtagagacgggggttttattatgttggttaggttggtttcgaatttttgattttgtaatttatttgtttcggttttttaaagtgttgggattataggtttgagttattgtattcggttaagatagagattttttgttttttgaattttttgaatttttaattaagtgaaaatataaaaggtaattttaaggaggaaaaaaatttaaaaaatttatagtgaaaatttaagaaaaaaatttagtttgatagaatttttttatttttattaagagaaaataaaaattgtagttggggttaggcgcggtggtttacgtttgtaattttagtattttgcgaggtagaggtaagcggattacgaggttaggagatggagattattttggttaatacggtgaaattttgtttttattaaaaatataaaaaattagttaggtgtggtggcgggtatttatagttttagttatttaggaggttgaggtaggagaatggcgtaaattcgggaggtagagtttgtagtgagttaagatcgtgttattgtattttagtttgggtgatagagcgagattttattttaaaaaaaaaaaaaaaattgtttaaaaattatattatttttttttttttttttttttttgagatggagttttgttgtgttggttaggttggagtgtagtgatgtaattttggtttattgtaatttttgttttaagagtttaagtaatttttttgttttttgagtagtagggattatagttgtatgttattatgtttagttaatttttgtatttttagtagagatggggttgtattatgttgattaggttggttttgaatttttgattttaagcgatttatcgtggtttatttttagttttttaaatttttggtattataggtatgagttattgtttttagttaaatcgtagtttttataagggatttttttttttttttttttttgatggagttttgttgttgttgtttaggttggagtgtaaggatgtaattttggtttattgtaatttttgttttttatgtttaagtgatttttttgttttagtttttttagtagttgagattattggtgtatgttattatattcggttaatttttagtagagatggggttttattatgttggttcggttggtttcgaatttttgattttagatgatttatttttcgcggttttttaaagtgttgtgattataggtgtgagttattatgtttggtttttataagggattttaatggtttaatgcgatagttgtggttttagtgagtttagggtgttttttggtgtttatgtgggtttaaggatgtgatatttagaaaaaatatttgtaattttgggggatatgtaattgaagttatttgttaattttttaagatttttattttttttttttttttggagatagagtttcgttttgttgttttatttggagtgtagtggtgtaattttttcggtttattgtaattttcgtttttttggtttaagcgattttttgttttagtttttggagtagttgggattataggtgtatgttattatgtttggttattttttgtattttttgtagagatagggttttattatgttggttaaggtggtttggaatttttggttttaagtgatttattggttttggttttttaaagtgttgggattataggtgtgagttattatgttcggtttttttattttattttattttttttgaaatagagttttatttttttgtttaggttggaatgttggtggtttgatttttgtttattgtaatttttatttttcgggttttagcgatttttttattttagttttttaagtggttgggattataggcgtgcgtaattaaagatttttatttttagtttattttgttatttttatgagtttgttaatagttgttatattaggttattttgtatttggattagaaggtacggtaggagcgtttagggttatatattaggtttaaatagttgagggtagtagagtaaggtttgtaggttaatgttttaaggaggggtgggaaggattgagggtgtgggggttagattgtgtagtggtaggaattttaggtgttgtgtgaagtagagagtatgtattattttttgatttatatttagtttttttttgggtgtttgtaattttcgggatttttaaggaatttaaatgttgtagttttgggtttgcgaattttttaggatgggtagagtatggttttatttattttatatttttgttttatagtgtttttttagtttttttttgttattagagattaaattaggttgttttagggtagtgatttttaaagtgtagttttgggataaatagtattggtattatttggaaatttgttagagatgtaatttttagttgggcgtagtggtttacgtttgtaattttagtattttgggaggttgaggcgggcggattatttgaggttaggagttcgagattagtttggttaatatggtgaaattttgtttttattaaaaatataaaaaattagtcgagcgtggtggtaggcgtttgtaattttagttatttgggaggttgagataggagaattatttgaattcgggaggcggaggttgtagtgagttaagattgcgttatcgtattttagtttgggggataatagtaagatttcgttttaaaataaataaataaataaataaaaaaggaaatgtaattttttggtttggtttatatatattatattagaaattgtagtttaatttttttttatttttggagaattttgtttttcgaattaggtttttttttttttttgtttgttttaagttttaatattgagtagttgtgattttggaatagttagatgtgggatatttttttttgttaggaagtatttggttttttagttagtttagtttgatttttggtttggtttagggaaagaaatttatgttttggattttgagtaatgtttttttgttttaggtgtttgttgggtttttatttatattttaaaatatagtttgaatattgttttttttgtgaattttttgtgatttttaggttagagaagatggtttatttgtgagtttgtaaagtatgtgtatatgttttgttaattattagtgttataattttttgattgatttttgtttgagtaagattgggataattttgagcgtaaggggggtttggttttttttattttagttttagttttttaaatataatgtttggtacgtggtaggtatttgataaatatttatttaatgaaggaattgtttgtaatggtttggtagataggaaagcggaatgaaagtaggttaaaagtggttgggagaagattttttaaatttcgatgttgggtatagggatttttgaagtttttttttggaatttttttatttgttttgttttttttttattaggtatatttttgttttttagagtttatttagttatatattattttttaggattattttttatattagttaggtgtaaattttataatgatttttgttatggtttttaatgtttggttgtaattttgaggttaattttagtgagagtaaggagtttatttaatggaagtgttattaggagtgataatggttggtttgaagattagggaaatagtgtttatattttaaaagagaagattgttttataaggaatgtatagttttgatatgtgtagggtttaggtttttaggggataaataagtttttaaatgcgttattaataggaattttttttaggataaataggaaaagaatatttaggttttttaattaaaattttattttatatgtttttaaaatttataatagatattttattttaaaataaagtaaaatcgagaggtgatagcgtgttggtagtttttatagttttcgtttgtttttttcgttttttttgtttgggtttttattttggcggtatttgaggagttttttagtttttcgttgtattgtgggagtttttttttgggttggttaaggttggagtttttttttttagtttgcggggaggtgtggagggagaggcgcgagcgggaatcggggttgtgtgtcgcgtttgtcggttagttggagtttcgggtgggcgtgggtttggcgggtttcgtattcggagtagtcggttagttttgttggtttttggtaatgagggatttagtattcgggttagtagttgcggagggtgtattgggttttttagtagtgttagtttattagcgttgcgttcgattttttatcgagttttagttgttttttcgcggggtagggttggggatttgtagttcgttatgtttaagttttttatttattttaagggtttttgtgcggttcgagttttttcgacgagtattattttttgttttacggcgtttagttttattcgattatttaagggttgaggaatgtaagcgtatcgtgcggtattggtaggtagttttatttgtagtttcggtgcgggatttattaagtgaagttagttgggtttttgagtttggtggggacgtggagagtttttatgtttagtttagggattgtaaatatattaattagtattttgtgtttagtttagggtttgtgagtgtattaatttatattttatttagttgttttggtggggttttggagaatttttatgtttagtttagggattgtaaatatattaatcggtattttgtatttagtttaaggtttgtaaatatattaattagtattttgtgtttagtttaaggtttgtgaatgtattaatttatattttgtatttagttgttttggtggggttttggagaatttttgtgtttatattgtgtatttaattaatttgatggggatttggagaatttttgtgtttagtttagggattgtaaacgtattaattagtattttgttaaaatagattattcggttttattaattagtaggatgtgggtggggttagataagagaataaaagtaggttgttcgagttagtagtggtaatttagtcgggttttcgtttatattgttaaagttttgttttttcgttttgtaataaattttgttattgtttattttttgggtttatagtgtttttatgagttgtaatatttattgtgaaggtttatagttttatttttgaagttagtaagattaaaagtttatcgggagaaataaataattttagacgtgtcgttttaagagttataatattgatcgtaaagttttgtagttttatttttgagttagcgagattacgaatttattagaaggaaaaaatttcggatacgttcgaatattagaaggaataaattttagacgcgttattttaagagttgtaatatttatcgcgagggtttatagttttatttttgaagttagtgagattaagaatttattaatttcggatataaaatttgtttaattatagaaaatatgaaaagtatataaaagtagggttttattttgtcgtttaggttggagtgtagtggtgtgattacggtttattgtaattttaaatttttggttttatacgatttttttgtttcgttttcgaaaattttagttttatagatatgaattatagcgttagtttttattgtttttttttaatacgtttttttattttttttttttttttttattttgtatttgatttcggtgtattttagtttttaggttaatatacgtgattacgtttgtttggggtagttgaagtaaaggacgcgaggcggcgttgttatcgtattttgtgaatcgtagcgttttgggtttttttcgttggtttagtattattttagtgaacgttattttatattttttgtgtgtgtgtgagatggagtttttgtcgtttaggttggagtgtagtggcgcgatttcggttttttgtaagtttcgtttttcgcgtttaagttatttttttgttttagttttcgagtagttgggattataggcgtttattattatattcggttaatttttgtatttttagtagagaaggttttattatgttggttaagttggtttcgaatttttgattttaagtgattcgttcgttatggttttttaaagtgtcgggattataggcgtgagttatcgcgttcggttgttattgtagattttgatgggggttatattcggggtataaattaggatttttattgaaagggcgggattatggaggtttttttttggttttttagttgtgggtttttttttgggcgcgaagttagtttttattagaattgtttagaggcgggcgttgtttttttggggtgacgtagtagtaggaagagttttcggattttggaattcgtgggcggttcgtgggaggggttgaggtttatttttttatttatttgttttcgaattcgtcgtggtgttttaagcgagttaagattttagatcgcgttttaggttggattcggaattattgtttcgcgggtttgtatttttatagcggtaggtgtgagtttttcgtcgttggagattagaagtttgaaggtagtttcgtttattttagtttatagcgtcgttatttcgtttttatattagtaaatatttgttatttttcgtagattagggcggggtgacgggtgattttagttttcgtagtgaattttggggcgtagaatttaaaacgtttgcggtcgtcgagcgtagtttcgttttgggttatgtaagtgatagcgttgggtcgtttttttttttttttcggatttcgtagtggcgtttaaagtttgtaaggaggaggtcgtttttgtgttgtgagtttaggaatttaaggcgagtgttgagggagaaaatgtagttgatggggtagagtagaaggggttgtaggtgggttggagggggaggggaacgggtagttaggtttggattttggggagtgatttattcggagtcgaagattattttagttttttttagtttagaaagggtgggattggttttatttttgtttgttattattttaaaatgtcgtgggataaattttatatattattattgttatttatttatgtattttattttttttgagatagttttggtttgttatttagattggagtgtagtggcgttatttgggtttattgtaatttttattttttcgggtttaagtaattttttttgttttagttttttaagtagttgcgattgtaggtattttttattacgttcggttgatttttatatttttagtagagacggggttttgttatgttgtttaggttagtttcgaatttttgattttaggtgatttattcgtttcggttttttaaagtgttgggattataggtgtaagttatcgcgtttggtcgggaaatattttttatagaaataaaggtagttggttgggtgtggtggtttatttgtaattttagtattttgggagggtgaggtaggtagatggtttgagtttaggagtttaagattagtttgggtaaaatggtgaaattttttttttattagaaatataaaaaattagttaggtgaggtggtttatatttgtagttttagttatttcggaagttgaggtgggaggattatttgagtttggggaggtcgcggttgtagtgagttatgattaatttataattgtatttcgtttgggtgatagagtgaggttttgtgttaaaaaataagaaagaaagaagagagagagagaggaagggagggagggaggagttgaggtttagaatatgtaatagtgtttattgttatattttatttaatggattatggattattatgtagtgatttaaaagtaggagtttgggtttatatttgtaattttagtatttgggaggttgaggtgggcggattatttgaggttaggagttcgaaattagtttggttaatatggtgaaatttcgtttttattaaaaatataaaaattattttggtatggtggtatacgtttgtaattttagttatttgggaggttgaggtaggagaattatttgaatttgggagatggaggttgtagtgagttgagattgtattattgtattttagtttgggggataagagtaaaatttcgttttaaaaaaaaaaaagatattttttattttggattgttgggtcggggggtggtgggtatttttatttataattgttagattatttttataaataatggaaatagttttaggttttttagttttttatttttaaaatgggtttttttttgtattattaatagtttttaatgttttggttaattaattgagcgattgtttatagatttgtaggttatttggatttataattaattttattaatgaggttgaaatgtgaagtttattttagttttaaagaagtaatttagtaaggattagtggttttatttaatagtttggttttgaggttggttgtggttttgttatttatggtgagtattatgggaatgtaggtaagggttgtgagaggtttggaataaggttttatttaggagagatttgggtgggcgttggtgattagtagaatttaggtgttttggttagtgtttttggagattagttttttttattttaggtattttttttattttggaatgagtttgtttattttttaggaagattgaaaggaattcggttagaagaatattattgatttttatttagatttgattttagtagagttttgggatttgttatattttatgggtgagttttatttaggtttttttttttgaattatttgttttttttttattgattgggatgatatttaattttataatttgttgtagtatttttgtttttattgtgatagtaaattttttgagattggtggttattttgggaagtgattagatttagaagaggttgagaggttggggtttttatgatgggattagtgtttttttaagaaaaagaagagattggagtttttattttttttattacgtgaggatatggtaagaaggtagttgtttgttaggtaggaagagggtttttattaggaattgaatttgttggttttttaattttagatttttagggtttagaattgtgagaaagaaatgtttgttgttaattaatttatttgtggtgttttgttatggtagtataagttgattaaataagtgttaaaattaaattagtaatttttattttttagtttcggatttagtattaaggaattttggttatatagtttatttatttatttaataaatatttagtaagtgtttttgtgttaggtatttttttaggtttggtgattatttaattaaaagagattaatatttgttttttgatgtttataatttgaaagataataaagaaaaatatagtaatagtagtgaattatatggatgtgttttagtaattgattgttgagtaaaaaataattttaacgtatataaacgtcgggtatggtggtttacgtttgtaattttagtattttgggaggttgaggtgggtagattataaggttaagagttcgagattagtttggttagtatgatgaaattttgtttttattaaaaatataaaaattagttgggcgtggtggtaggtgtttgtaattttagttgtttgggaggttgaggtaggagaatcgtttgaaattagaacgtggaggttgtagtgagttaagattgtgttattgtattttagtttgggtgatagagtgagattttattttttttaaaatatatatatatgtatatatatattataaataatttttatattattttttattttgtgggttgattgggtttagttgggtagttttttcgttttatataatatgggttgggttattattatttggagtttagttggtttaatatatttaagaggtttttgtatagggttgtagttggtgttggtttgttggttgggaatttattgaggttgtgaattaggtgatttggttttttttttatttgtttttttacgtgttttggttgtttttggttttgtatttggggttcgggtgttttaagtggttaagttagaattataaggtattttatgttggaattttagaagttaggtagtattacgttttttatgttttagttattaaagtaagttttagatttaaaaagggggattagtattagtttttgatagaggatggtaaggttatattgttaaagagtatgtgggatgggagatattgttgaggttatttttggaaaaggatttttatgtttataaagtgataggtgataaaaagaaaaaataggttaggtgcggtggtttacgtttgtaattttagtatttcgggagatcgagatgggtggattacgaggttaagagatcgagattattttggttaatatggtgaaattttgtttttatttaaaaatataaaaattagttgcgtgtggtggcgtgtatttgtagttttagttattttggaggttgaggtaggagaatcgtttgaatttaggaggtgaaggttgtagtgagttaatatcgtattattgttttttagtttggtgatagagtaagattttattttaaaaaaaagaaaaaaagtaaaaaaaaaaatgtaaagttgataattaatgtaaagtaatagaggtggtattttaagtagggtggttagggtgggttttatgaaggtgttatttgagtagatttgaagaggagagaaattgagatacgtaggtatgtgtaaaggaagaattttttagaattatttttatgtatatttatgttttgtatatatttagggttttgtattgaggtagattttaaagttgtagtgggaatggaggtggatatatttatggaaagatttttttaaagaatgttggggatttaggtttattttttttgttgtggtttttatacgatttggagttggggagggaaaggtattggtatgtggaggaagattaggagaggaggggaggttaaagcgtgttttatttttattttatttttttgttttttgttttttatatcgagtgtttttttttttagggtttgtggtttttgataaggaggattttgagggtaattatattttgttatgtagagtatttggttttttatttgttaagtttattttgattcggttgtaggaagggaaggagttaatttcggatttaagatttaaggggattagaattagggagatgagatatattagggttgggtagttgtgggggtttttttagagaggagttgagatacgtttatttggaggggtttttgggtttggaggggttttttagtgtgattgggtgaagtgtttttagaggattagggttgaggttgggggtattttatttagattttgtcggtatttgttttagaatttaagggttttttttttttttttttttaatggaaatgttggagatgtttttagttattttttgagtatttatatattattttttatttggaaattttttttattttaatttttttttttgtcgtattttttgttttatttttaggttttggtttttttttttttttttttattttttagtaggtaatgatttagtttttattgaggagttagttgtaggtgagagtttgggttttcggtgaggttgggagaaggaaaaggtttatgggttagggggtgggagggagaatgggtatagttagagtagagtggaagggttgggggaggcgataaagatagatgttttcgtattattattttttttttatggttcgagggagttgttttttttttaagtttaggaaagtgaaaagagaagtaggaatagtaaaatattttataggaaaagaaaattttagtgattttttttgttgtttttttttttttgtttattttggtaaattttgtaagtgaaatttgttattaagatgtgaaaattttataagaaagtttttaaatatttgagaataaaattattaatgttttagttttgtaggttgaaaaaacggaggttttataaaataaaattatgtttggaaaattttttttttgagggatgttaaaggttgtattgaataagttttaaggtggtgttgaaatgagttatttatttgtttgtgtaagtttaggtaggtgttggaattgaggaagtataggtaatgaaaaaagtaaatatgttttcgggatatagcgattggtgatgattatataattaatataataaattttagtatttatattgtagtttagtttatttaagtaaagttatttttaatagggagtttattttgtatagaatacgtgtatttttatttgtttttagattgattttttgtttattataatagtgaaaaaaaatatagttttgggtggagatttaagatgttaatgagttatgagatgtatgaataagtatgtatagttattgtatacgtgtatttagaagatcgtttagaatatgtttgttagtaatatttttttttatttattttttgtgaataattatgtaagatttttataaagggagtttttttagtagtgattaatgttgttttatttttaggagtagtttattttgaatttttttagggtgtatagtttattttgtatttaatttttaaaataatattttttttttgtaataaattgttttgtattttattttttttgttgcgtgttttttgtttaaatttttttaaatgaagaagttaagaattaaggtattataatagtcgttaatattttcggtgttatgatttagaggtttgtttgtttcgttggttttagtttttttttattattggtgagtattatggtagttagagatttttgattgattattattgttttttttagatttattaaggttttgggggaggattttttaatttatttatattttttgagtaattaattgtgattgttttttatttggttgttgtttttatagtgtttataattattttatttggatggaacgttttgattatttagttttgggatttttgttgtttttgttttattttttgttttgttgttttttttaggattgtatttgatttgtatttattggttattgtaatttttttttttttttttttttttttgagataagagttttattttgttatttagattggagtgtagtggttttatttcggtttattgtaatttttattttttgggtttaagcgatttttttgttttagttttttaagtagttgggattataggcgtgtattattacgttcggttaatttttgtatttttaatagagtcggggttttattatattggtttagttggtttcgaatttttgattttatgattagtttattttggttttttaaagtgttgggattatagatatgagttatcgcgtttagtatttgtttgttaattaagtaatttttttaaagatttttgtttattttgagggatatattagatttatttttgttaatagtttttatttttttaggttttgtgtgttttgagatttttttgagttttagaggagtgtgttttgaacgttttttttgagaataggagacgttttaagaggttatttatgttgagtgtaggatgtgtggttatatggatgtgtagttatggggattataattaggtattttaagtatgatgattggatattaaaaatggtagattagtgaaataaggaagggtttgttggtgagatatttaggtttttcggttggtagtagagattattttagtttagtttggagacgtttagtattagtgagatttagaatggtgtatggtaaatgtttatgattttttagggttttagttttatggggatttaagggaatattttggattttatcgtttagtttagtttatagggatgtcgatgattttttggattttggtatatgtttttgtggttgtaggatttttttgttatttagaaagttattttttttattgttattgaaatatttttagggtatatattaaatattggaatattttgaaattgtataaattaaaagataataggtgggtgcgatggtttatatttgtaattttagtattttgcgaggtcgaggtgggtagattatttgaggttgggattttgagattagtttgattaatatggagaaattttatttttatttaaaatataaaattagttgggtatggcggtatatttttgtaattttagttattcgggaggttgaggtaggagaattgtttgaattaggaggcggaggttgtagtaagtcgagattatgttattgtattttagtttgggtaataagagtaaaatttcgttttaaaaaaaaattttttttaaataaatataataaataattgttaaagagtaaaattattgatataatttttattattttaaggtttaaggtttttttttttattattgagtttttttttttttttttatttttttatttataaatttttaaaataatttttacgtattgtgattttgttttttttagttgatttattagtttattttgatagtttgataggtgataagtagaggtgaggattttaaagtttatattaagtagatttagtttattgtggttttttttgataggaggtttgtgaagttggtagggttttcgtttaggttgtgtattgtttgggaatttttatttgtaatgtttggagatttttattttttttattattaataattattttgttatgtttgtatttttttgtattttattttttttgaattttgtttttttatgaaaatttattgttttttttgatttatttgtatttatagatttttatttgttttttttttttttttaattcgtaagattgataaaaattgttttaaagtttttttttttttgttttgtgtgttagggtttttttgtttttggtgagagtagagttttatttttatcggaagaaaatttttttttttttttttgagatgaaattttattttgttatttaggttggagtgtagtggttcgattttagtttattgtaatttttatttttttggttcgagtaatttttttgttttagtttttcgagtagttgggattataggtgtgtgttattacgtttggttaatttttttgtatttttagtagagatggggttttattatattggttagattgttttggaatttttgattttaggtaatttgtttgttttagttttttaaaatgttgtgattataggtgtgagttatagtgtttagttttggaagaaaattaattgttgggtgaaatatattttttattaaattttttttacgagatttagaaagtttaatgaatatagttatttatatgttttaagttgttattttaaggttaaaattaaaatattaagggtatatataaggttggttattattaatttgaaaaaaaagataaataaatttttatgattaggtttttttaatattgtatagttttaaataatattgttttataattagagtttttgttgttgttgttgtttttaaataaaaagaaaggaagtttgggtgtagtggtttatgtttgtaattttagtattttgggaggttaaggcgggtagattacgaggttaggaatttgagattagtttggttaatatggtgaaatttcgtttttattaaaaatataaaaattagttgggtatggtggtacgtgtttgtagttttagttattcgggaggttgaggtaggagaattatttgaatttgggaggtagaggttgtagtgagataagatttagttattgtattttagtttgggtgatagagagagacgttattttaaaaaaaaaaaaaaaaaaaaaaaaaaaaaagaggatgattagggattttttaagggtttaggggaatttgatattattttttttattaattagatagttttatattaagattagttttttagagattgatattaaatttattatgtttatgttatttaaaagaatttgggaggtcgggcgtagtggtttacgtttgtaattttagtattttgggaggtcgaggtaggtggattatgaggttaggagttcgagattagtttgattaatatggtgaaattttatttttattaaaaatataaatattagttaggcgtggtggtttgtatttataattttagttatttaggaggttgaggtaagataattatttgaacgtggtaggcggaggttgtagtgagtcgagatcgtattattgtattttattttgggtgatagagcgagattttgttttaaaaaagaatttggggaaatttaatataattaatgattttataataagaaatatattagttgggtgtaatagtggttttttgggaggttaaggtgggtggattatttgaggttaggagttcgagattagtttggttaatatggtgaaattttgtttttattaaaaataaaaaaattagtcgggtgtggtggcgtaggtttgtaattttagttatttaggaggttgaggtaggagaattatttgagtttaggaggcggaggttgtagcgagttgagattatattattgtatttttgtttgggtgatgagtgagattttgttttaaaaaaaaaaaaaaaaaaaagaaagaaaaatattttttattaataattttttttttttataatttagtttagggttattttttaaattttttaagtttttatttttgtagtttttttttatttgatatatagttttttgtatttcgtttttattagtttgtttattaaatattttttaaagagtttagttttgttgggataatttatagtagagtattttattgtttttttaaaataaaaagtaatttatttttattttttatttgtattttttttttttaggtaatatatagaataataattaaatttttttagagatttattttatgagttagtttgttttagatattaggaaaaagttataaaattagttataaatttttaagttttaataaatgaattgttaaatttaatttttggtgtttttaattattaagatagagtggaaaaggtatatagagattaaagggaagaaaagagagataaaagatagttttaatttttggtttttatttattatgcgaaaatttttatttttaggttattttgagtggaatttaagggttatttttgtatttataaaaagtttggatatcggagttaagtaagtaataaaggtttttaggtttgtaaattttttggagtttgttattaatgtgataaagaagggtaatggaagaaggattgtttttaattttgaagggaggagggatttttaattttttattgtttttggttaaagattaaagagattaaaggtaaaaaatagtttttatgtggtaattagttttagttatagtaatggagtttcggatgattttggatatgataggtaaaaatattaatatttttttaaagatagaggttggtttgttagtttttattgtttgttttgggtttttgtttattaaatacgatattgttattggtgttaatagtaaattttagattaggatttttattttattatgtagttgattaatttttgttgtagtaaaatttaggggtgtaggtttttggtgtgtttattaaaaataaaaaatgattttttttaagttattatagaaatttgaaataaagattttaagttatttttatgaagtattggaggatttaaggtttttgtttaaaaatagttaagatttaaaatattaggtaattaatgttgttttagtataagtttttatttaagaaaataatttatagtgaaatgtgatgtttttattttttttttatttatttattgtattttaggcgtttttagtaaaacgattttatttgttaaagaaataataaattatattattaatttataaaaattaatttagttttgttggttttgtatgattattaaaatttaaaaatgtgtaaaatttgtttttcgggaagaatgggttaatatttttatatattttttggaataaattttggattataatgtggaaatatttgattaaataaataatataaagagagttttttggatttggttattgttagtttaaatttttatttttatttatgaataatagttttattttgttaaggggaaaattgtttttttattttgttttttatttagagtaattttttttttgtttttatagtaattatgttagttttattttttttatagaaaaattttataagagagttagtatatttaaattttttttatagaattatttatatattttatgatagaattttaaagggggaattttattttaaaaagtttattaatattatttaattttattattttttaattagtttagtgattattaaatttttattatttttattatttcgatgtaaaatgtttttgtagtataaattttattattatatataatttgtttgtgttggtcgggcgtagtggtttacgtttgtaattttagtattttgggaggttgaggcgggtggattacgaggttaggaaattgagataattttggttaatatggtgaaattttgtttttattaaaaatataaaaattagttagatatggtggtatgtgtttgtaattttagttatttaggaggttgaggtaggagaatcgtttgaattagggagtcggaggttgtaatgagttgagatcgtattattgtattttagtttggcgatagagtgagattgttttaaaaaaaaaaaaaaaaaaaaaagaatttgttggtatttgtggatttttagtacgtttataattttttttataatggaagggacgatgttttatagtttatatttttttttatttattttttgtattggttaataaatttttttttttttttatgtattaatattataagatttatcgttgagtaggattttttgtttttttgggattagtgttattttttttatcgggattagtagagttagttatagagatagagttttgggaatttagtataaattgttttaggagattagagtggttttttgataaatagtagagagttttattagattttagtaatagttggattttttggtagttttataaaatcgaagagttttagatttttttatagttggataacgaggaatatgtttgtatttagaagaagaatgttgttttcgtattaattaaattataaatatatattaatagtatttttttggaataagaaaattattatttaggtagataaaattgaatatttaggagttttcgtgggaatttggaagtaatggttgttttttgttttgttttttttaataatgttagttattattatatgtttagttttaatttttggtttaattttgtttaaaatgttgattttttagtttggttaatatgtcgaaatattgtttttattaaaaatataaaaaattagttaggtgtggtggtaggcgtttgtaattttagttatttgggaggttgaagtaagagaattatttgaatttgggaggtagaggttgtagtgagttgagagttgagattattttattgtattttagtttgggtattagagttagattgttttaaaaaaaaaaaaaattgttgattttttgttttgttatttatagtaaatttcggtttatgtgatggttttgtaaggtttttaatttttggttgttaatgagttattttatattttgtttattagttttttgaaagatatggtttatatattgttagattaggtaggaaaagattttagggtttaggttaggtaaggataatgtcgtatttagtaggaagtagttttggaagaaatgatttagttttttattttttcgtatgattatgggttttaagattttttagggaggaattgaggtaggatagggagttaaggaagtaattgtgtttttgggatgtagtaatagtgataattatatagttaatataataagttttagtatttatattgtagattagtttatttaagtaaagttatttttagtagggaatttattttgtagagagtatgcgtattttgattttatttatcgttaaattgatttttagtttattataatagtaagaaatatatatttgggtggagatttaagatgtttatgagatataagatgtatgaataagtatgtatagttattgtatatgtgtatttagaggattatttatttagaggattatttagaatatgttgattagtaatatttttttttatttttttatgaataattatgtaagatttttataaagggagtttttgtagtaataattaatgttgttttatttttaggagtagtttattttgaatttttttttttagggtatattatttattttgtatttaatttttaaaatattattttttttttgtaataaattgttttgtattgtattttttttgttgtgtgttttttgtttatatttttttaaatgaagaagataaagatagaggtattatagatgttattaatagaatttttatgttttttttaggaaagtgaaatgagtatttaatgtttagattttggttataatatattaatttttaatagaaggaattagggttttttagaaaaatagttgattttaggggtgaagtaggaaaaatataagataagtttggaatattttgaaatgttataaaagaattgggtatggtggtttacgtttgtaattttagtattttgggaggttgaggtaggcgaattataaggttaggaattcgagattagtttggttaatatggtgaaattttatttttattaaaaatataaaaaattagttaggcgtagtggtgggtatttgtaattttagttattcgggaggttgaggtaggagaatagtttgaatttgggatgtaagattaggaagatttaatattgttaatatgttatttttttttaatttgatttatagaattaatgtaattttagttaaaattttaggacgttattttgtgtatatttataagttgatttaaaaatttatatggagaggtcgggtatagtggtttatgtttgtaattttagtattttgggaggtcgaggtgggtagatgatttgaggttaggagtttaagattagtttcgttaatatggtgaaatttcgtttttattaaaaatataaaaattagttgggtgtggtggcgggtgtttgtaattttagttatttgggaggttgaggtaggagaatcgtttgaatttaggaggtggaggttgtagtgagttgagattgtattttagtttgggtaataggagcgaaattttgttttaaaaaaataaaaaataaataaataaaaaaggtttatatggagaggtaaaaggtttagttagtataatatagaaggaaaataaagttaaagtattgttatatttgattttaagattttttataaaattgtagtaatttagatagataattggtatagttattgttggaaggagtatgaaggttttttaaaaaattaaaatatagaattattatatgatttagtaattttattattgaatatatatttaaaggatataaaatttgtgtgttaaagagatgtttgtatttttatgtttattgtagtattatttttttttttttttttagagttagggtgttattgtattgtttagtttggttttagaattttggttttaagtggttattttgttttagttttttgagtagttggattttatgtgcgagttattatatttggttgtagtgttatttttaagagttaagatatggaattaatttaagtatttattaatggatgaatgtataaagaaaatgtggtatatatatatagtgggatattatttagttaataatatgaatgaatttagaagatattatgttaagtgaaataagttaggcgtaaaaagataaatatgattttatatatatgtggaatgtaaaaaaagttaaatttatatatatggtgagtaaatcggtagttgttagaggttgggaggtgggaggattggggaggggtaagtaaatgatataaaattttttttttttttttttttttttttttttaaagatagagtttcggttgggcgtagtggtttaagtttgtaattttagtattttgggaggtcgaggtaggtaaattgtttgagtttaggagttagagattagtttgggtaatatggtgaaattttgtttttattaaaatataaaagaaattagtcgggtgtcgtggtatgcgtttgtagttttagttattcgggaggttgagataggagaattgtttgaattcgggaggtggaagttgtagtgagttgagattgtattattgaattattgaattttagtttgggtaatagagagagattttattaaaaaaaaaaaaaaaaaaaaaaaaagataagagtttttttttgttatttagtttggagtgtagtggtatgattttggtttattgtagtttttgaattattcgggtttaagtgatttttgtgttttaattttttaagtagttgggattatatgtatgtgatattatatttagttaatttttgtatttttagttttattatgttgattagtttggtttcgaatttttgattttaagtgaattattcgtttcggttttttaaagtgttgggattataggtatgagttattatgttcgattaatataaaattttaattagataggaagaataagtttaagagatttattgtattttatggtgattaaatttagtaattatatattgtatattttaaaattataagataaattatttgaagtattattattataaaaagtatgtgaggtaatgtatatgttaatggtttgttttagttattttataatgtatacgtatatgaaaatatgatgttatatatttaaatataatttttatttgttaattaaaataatttaatttaaaaaagatagtgttgtattggtaaaagaatagataaatagattaatgaaatagaatagagaattaagaaatagatttacgtaaatatagataaaggagtaaagataatatagtggagaaaagattgtttttttaataaatggtattggaaaaattggatatttatatgtaagaaaagtgaaatgaaaagagtttttttgaaaggttgttgtgaaggttatttgtgataggaataaaaagtgtttagtagggtttttgatagtaagtttttatattaatttaatggttggattttaatagttttagtttcgtttttataaaattttgttatgaaggttataatgatttttgttagttatgtagttttattaatttgttgggtaggatataatatcgaaggggttagtatattgtttttagggggttttgtggttttttgattttgtggatgatgttgattataatgttttgtttgtttttggttgaagataggttttttttgtagaggttaggtatgaatgtatatttgagtaagattttattatgatttaagaataataaatataaataaataaatatgataatataataaattaggttttattttttgttgttgtaatagaatattatagattgggtaatttattaaaatatgtattttttatagttttggaggttgggaagtttaagagtatggtattagtattttgtgggggtttttttgtagtgttattttatggtgaaagaggtagggtaaaggggttaaatatattttttattaggagtttatttttataataatgatattaatttatttaatttaattaatttttaaaggtttttttttttaatattattagaatagtaattaaatgttaatatgagttttggggggttatttaaattgttagaggtatgtgaattagagtaattttattttgaataggggttgagtaaaataaggttgaattttattgggttatatttttagacggttaaggtattttaagttataggatgagatagaaggttagtataagatataggttttaaagattttgttgataaaatgggttgtagtaaagaagttagttaaaatttattaaaattaagatggtgatgagagtgatttttggtcgtttttattgttatatttttattagtattatgatagtttataaatgttgtggtaacgataggaagttattttatatggtttaaaaagggaaggtataaataatttattttttgtttagtatattattaagaaataattataaagatgggtaattagtagtttttaggggtgttttgttgatggagtagttatttttttgtttttttatttttttaataaatttggtttattttattttatggatttgttttgaatttttttttgtgtaagatttaagagtttttttttggggtttgaattaagattttttttttgtaataaaattttagtattaggtaatttgtggtttatttttttttttttttttttttgagatagagtttttatttttattgtttaggttagagtgtaatggtacgattttggtttaacgtaatttttatttttagggtttaagcgattttttagttttagtttatcgagtagttgggattataggtatgtgttattatgtttggttaattttgtatttttggtagagatggggtttttttatgttggttaggttggttttaattttaggtgatttttttgttttggttttttaaagtgttgggattataggagttagttatcgagtttggtttggtttatgtatatttatttttatttttatatttttatgattatgagatttatagtttatttaatagatttgaattgatttaatgtttagtatttttttaagtttttatagatgaataaagttaatatttatagattttatttatttatggtttaggattatttattgtaaattattgggggttagtttattttggagtttataatttaaagtagaaatttaggtggttaatatgttatttttatgaaggattgttatgagtgtattattttaattgttttgtagaagttttatttgttttgttagatatagtaagtttttttttaaaggtttagtttttttaatttttttgttttttgttttttatttttaaaatttaatttttttgtatttttttgtttttagttattcgttttgtaaatattaatttttattagttttaatttgtaatttgtagagggttttttttgtttttgttatgttttgatatgttttgtatagtaaaggatggttttttttttttcgttgaaatagtttttttcgttttatttatttatatttttgttttatttgaaatagttaattgggattagtttagattgtgtagtttgattttagtaaatggggataggatatagtagtaggggttgattgcgttagggataaaattcgtttttgtttattgttcggtgtgtttttatagtagttagaagtgtaagtagtatttttttgtagaagtaaatttgttttgttgagaaatgtttttgtttgagtgtttgttttttttgcgattttaagtttttgtttttttttttttaaatagttgttatttttttgtttttgtttttgtttttgttttttttgagatggggttttattttgttgtttaggttggagtgtaatggtgtgattttagtttattgtaattttggttttttgggtttaagtgatttttttgttttagtttttcgagtagttgggattataggtgtgtgttattatgtttggttaattttttgtatttttagtatagatggggtttttttatgttggttaggttggttttgaatttttgattttatgatttgtttgttttggttttttaaagtgttgtgattataggtatgagttaatgtgtttagtttttttttttttttttttttttgagacggagttttattttgttgtttaggttggagtgtagtggtgtgattttggtttattgtaatttttgttttttgttttagtttttcgagtagttgggatgataggtgtttgttattatgtttggttaatttttgtatttttagtaaagatagggttttgttatgttggtaaggttggttttttgattttaggtgatttatttatttcggttttttaaagtgttaggattataggtatgagttattgtatttggttttttgtttttaatttataaatgtaattaatttagttttgtaaattaaaaagtgattgaggtagattttaattaattcggtgtttattttgttaaggttgaaaatatgttgggggaaaagaaatataagttataataggatttgtgatttgtgttttttttaaggaggattttgggatttttaatatttaaaggagaaagggtaagtaggagaggaaagaaaaaaaaaggaaggataggtaggtaatgatgcgagtggttatatatttgtgaggttgtgattagtttttagtgaattatattttatatgtgaaaagaagggagggaggaagaagttagttatgtatttatattatgtttagtaaatttatattttatataagttaaagtaagtatgtaaaattatagttatatgtttgggaataaaaggaaggtaaattttgtatgatttagtttttaagtttaattttttgtatagtagtttggggttttgagattttattttttttttatattttttttttgttatttaaaattttttagagaaagtatggtagaagaaaatgggtgtttgtttatgggtttagtttaattttttttgttagaatgatttatttttggaagattagattttatgttgttaggaaggtttatttttaggggtttgtaaagttttttgttttatggagaaaaatagagggaggaagagagaaagaaaaaagggaaagagagaaagaaaaaagggaaaaagagaaataaaagggagggattaagattagattatagaaataaagggaatgtaattttggaaaagtaatttaggatatgttatcgagaagtttatattttagtaggtaggtataaaggtggggtgtgtgaggttttgattagtgtttagtgaatttatattttataggtgaaaagaagggagtagagaaaaaatttattatgtatttgttttgtatttagtaagtttatattgtatataagaaaaagtaagtttgtgaaaatatagttatttgtaaatgttattatttttgttattacgttataaagtttaaattttttagttttagtttgtagggttgtaagaaaagtatagttttaatttttagtgattttaagtgagaaaaatgggagaaattttttttttgaaaatgttattttggagatttatagttagggaagaatttaggatttagtttgaataaattgtagataaatagtgaaaattgaaaaataatggataaggttagaattttataatgagtatattataattttttttgaaataatttttttttttttagttttttatttttattaaaattaaaattatagtgggattaacgtatttgtaaaataagttttagttttattatatttggtttgattatttgtataaagcgtagtaagaataattattggttaataggtttttttttttttttgagatagagtttttatttttgttgtttatgttgagtgtaatggtgtaattttagtttattgtaatttttgtttttcgggtttaagcgagttttttgttttaatttttcgagtagttgggattataggtatgcgttattaagtttagttaattttgtatttttagttaggacggggttattttatgtttgttaagttggtttcgaatttttaattttaggtgatttattcgtttcggttttttaaagttttgggattataggtttgagttattgtgtatggttttaggttttttttgaattggttttgttagagttttttataaggaattttagattagagttttttttgagtttagttaaggatttatttgtgtttgtagatatttgtatgaatgaggtaaatttttgtttttttaaggttttaaaataacgtgtggtttttaggtttgtgagaaagtgatatttttatttattatttgttaggaattttgtaaaggaaatgcgtagataaagtatgaggttagtttttttaagggttttttttttttttaattagttttataatattaattttaagtttttaaagtagtttgtttatattttaaaatatggtattttagttaaagttttggtaaaataattagtgttaaaattatgttttgttaagaaagaaaatagatttttattaaatttatgtaattaagtatattgttataaattatgaatatttagaaataaggttaggcgtggtggtttatgtttgtaattttagtattttgggaggttgaggtaggtagattatgaggttaggagatcgagattagtttgattaatatggtgaaattttgtttttattaaaaatataaaaattagttaggcgtggtggcgggtgtttgtaattttagttatttaggaggttgagataggagaattatttgaattcgggaagtagatattgtagtgagttgagatcgttttattgtattttagtttgggagatagagtaagatttttttttaaaaaataaataaataaataaaattttagaaatagtttttgaattttggagaaattaggtagagagaaagaaatatgttttaaattttgtttataagagtacgttttattgtgaaaagttgtaaatgtttaaaagaaaagtttttttgattttgaaaaataaagtaaaaagaattagtaatgtttttaataaaaaaagttataaaagattattttggttaggcgtggtggtttatttgtaattttagtattttgggaggttaaggcgggtggattagaaggttaggagttttagattagtttggttaatatggtgaaattttatttttattaaaaatataaaaaattagttgagcgtggtggtgtatatttgtagttttagttatttgggaggttgaggtaggagaattatttgaatttagtaggtggaggttgatggtgagttgagattatgttattgtattttagtttgggtaatagagcgagattttattttaaaataaataaaataaaataaaataaatttttttaattaggtagaattattttttttttaataaaagttttatttttatgtttttttatgtttttattaaaaattatattttatttttttttgtatgttgtttgtagaattatttattttatatttagtaatttaaattatatttatgaattgtaatgttaatttttagtaatttttatttttagtgaaaaaattaggaggtatataattttaattagtattttttgtagaacgtaatttcggtttattgtaattttcgttttttaggtttaagcgatttttttgttttagttttttaagtagttgggattataggtgtgtgttattacgttcggttatttttttttatttttagtagagatggagttttattatgttatttaggacggttttaattttttgattttgtgattcgttcgttttggtttttgaaagtgttgggattataggcgtgagttatcgtgttcggtttattataggattttataaggagattaattgtatttagataggtgtttttaatttggtttgtattttttaattggattattgaatttagggtagagtttatattgaatttttagtgtttagaaagagagtaatgttatggggatttggttatataatatttttagtgtgttttgttataaaaatttttttttaaggttggtgggtaatttagtgttaattagtttattttgtgattagtttattttttagttattgtatacgttaaagttaagtttttttataatataaagtgatttttgattttatttaaagttaaaattaggttatgtaaggtaaaggaatagagtttttgatttgagaggattttgtttttttttggatttttttttgggattttttgaggaaaaaatagtagttttttataaaaatgcgtttgtggtgttttttgtattttttttaagggattttaggttattagaattttatttaatttaattttttttttatgtggtattaaggttggtaagaggaaggaggggttgatagaaataaataggggaggtcgggcgtagtggtttatgtttgtaattttagtattttggggggtcgaggtgggtggattattaggttaggagttcgagattagtttcgttaatatagtgaaatttcgtttttattaaaaatataaaaattagttgggtgtggtggtaggcgtttgtagttttagttatttgggaggttgaggtgggagaatcgtttgaatttgggaggtggaggttgtagtgagttgagattacgttattgtattttagtttgggtgatagagtgagatttcgttttaaaaaaaaaaaaaaaaaaaaaataaagaaatagggaaatagaggaagtgtatgtggttagtagggggttgaaaaagagagatatttagttgattgagaaatgtttatttagggagaaaagagattttaaagtaatatgtatatattgaagtttaaaatattagttttaattaagttaaattttgattatagagttttaaaaaaattttttgatattttttattattagattttagttaggaggaatagttgatatttttggttttttattttttttattaaaaggtatttttttaagtgttttaattaaagttatgattattaggttataaggtgggtggtttttagttgttttttgatgaggtggtaaatttgagttatggtagaagtgtttaatgtttttttttttagttttgttttgttgtttaggttggagtatagtggtgtgatttcggtttattgtagttttcgttttttaggtttaagcgatttttttgttttagttttttgagtagttgggattataggtgtttattattatattcgattaatttttgtatttttagtagagatagggttttattatgttggttaggatggttttaattttttgatttcgtgattcgtttatttcggttttttaaagtgttgggattataggtatgagttatcgtattcggttgagaagtgtttaattttaattattagaagtgtttgaagtgatttttttgtttttaatttagttaagggaatttttgaagattagttatgatattattatgtgtttttttaagatttgatgtttttattaattgtttagaataagaaatttttgaaatttttaatagtttatagagagaggttgggaaggtgtttttgttatataaatgaaattttttaggtagttaaattttatttttttttaattagttgggggttttataggtgtaatttgattttttgtagttgtgggttttttagtatagtttttgggttagggatttttatttgttttttagaggtttgtatttaagatatagggttttttgggttttttagtataggtggatttaaattaatgggttagaaatagagaaagggaggtagaattttttatttatagttagattttgtagtatagttttttagagttttagtttttttgttttggttgatgttttttttttgattttttttattagggttttggttttattatatagttgagttggtttaagttaaagagttgttggagtagtagttggagtggattaggttttgttggagggggtggggggtttaggttttgatggttaagatttagaatttgaagaaatagataaggaaggaggtattaagagagtttgggaggagatatttaagttttttattagtgtttgtggtattttttagtattggaaatattgtgtattatttttaggaattttaggattagaaatattttagttgtttttaggttattgggaaaatggaagagattataaaaggttagaagttagtagtgtgatggttaatattgagtgttaatttggttggattgaaggacgtaaaatattgattttgggtatgtttgtgagggtgttgttaaaggagattaatatttgagttagtggattgggaaaggtagatttattttaaatttgggtgggtattatttaattagttgttagcgtggttagaatataaagtagggagaaaaatgtgaaaaggttagattggttttttagtttatattttttttttatattggatgttttttgttttcgaatatcgaattttaagttttttcgttttgggattcggattggtttttttgttttttagtttgtaggcgatttattgtgggattatgtgattatgcgagttaatattatttaataaatttttttttatatatatatttattttgttagttttagagaattttgattaatataggtaggtagtggggagttagggttttgtagttttagttttatgttttttttgattttatagtagtgtattttagttttataggaatttattttggattatgttttataataatttttttttaaatatagtaagaagatgtagtatgtagatattatagatatatatgtgttttattttttattaggattttttttttttttttgagatggagttttttttttgttgattaggttggagtgtaaaggtgcgatttcggtttattgtaatttttgttttttgggtttaagcgatttttgagttttagtttttcgagtagttgggattataggcgttcgttattacgttcggttatttttgtatttgtagtagacgttgggtttttttatattggttaggttggttttgaatttttgattttaggtgatttattcgtttcgattttttaaagtgtagggattatatgcgtgagttatcgcgtttagtttagttaggatttttaaaattttgataattaggaatgggggtttaggagtggtgttgatgtagaggagggaagttatggggtgggggttgttaggggtggaggtagtagtgttttttttatttttattttggggtttttttttgaaggatagattattatattttagaattggtgagttttttattgtgtttgtttaattgaagagaaaatatggtatagttagaataaggtatgaaaaggggaaagtgaggtatgaatatacggtatatatgtagacgttggtgtattgtgtgggtttagaggacggacgtgggggtgagggaagggatgtaatatgatgagagaagatagaaattttatataaaggttaggaaaatattttaatatagtattaaaggttagggggtatgaattagttaagtgtttattatgtattagatgtttatgatttatgtgatgagattgaagaaaaatatattaaggtttagggaggaattaagtgttttatgagattagtatttatcgtggaggagatatttgttttattaggtagtttattaatattgatttcgaagcgatgttgtttattatattggatttttgtatgatttttatttgatataaacgttgatggttaagttttgttttaaattagtttgttttagttatttgaaaggaggtagagggtagaaatagaagatttaaagagggaagatatttagagggagggaagaggatgtaaggtgtgaaaagatagaaaatataaggaatgggagagtaggtgtttttttgggtgtggggtttatttgttattgataaaggtaatgtttatttatttgatgtttatgacgtggtttaataggttggtaattatagaattggttattgaaaattttttggggttatttttggatatgtgtagaatagtaaataattttagttatttgatgtgtttttttggttttttgtttagttttttttaggttttagttgttgttattgttgttggttgttttttatatttttttaaattttagatgggtgtgaggaggtaagggcgggaagaaatagtggattgtggattgaggtgcgattttttattattggaggggatagatttataagttggtattgaagaggtttttgttttttgtatagtgtgtttggttattttagtgtttaggttgaattttgagaagaaagaggaatttgattgtttgaaggtttttgggtggtgtttaagatttttggttattgtgttttggttgaatgtatatatgtagatggaatttttttttttttttttttttttgagacggagtttcgttttgtttttaaggttggagtgtagtggcgtaattttggtttattgtaagtttcgttttttgggtttacgttatttttttgttttagttttttgagtagttgggattataggtattcgttattatattcggttaattttttgtatttttagtagagatagggttttattgtgttagaatggtttcgattttttgatttggcgattcgtttgtttcggttttttaaagtgttgggattataggtatgatttattgtatttggtttcgatatagaagtttttaagagttagacgtttgaatttgtgggtatcggtttggggaaagagttagttggagtaaagttattttgaggtattaatttttttgttttttaaggttattggttttttatgttagtttttttataaatataatatgaggaaacgtttaggttggtagtaatgtttttagttagttgaataaataggtttttggttaaaggaggaggttttgataattttcggtttatatgtttaaagaatgatttaaagatttagaattgtttttgggttgattgtttggtttaagttttttttataatatataaagttgttttagttttttgatcgtagttttgtaatgttatggagtagtttatagtttatataggtaggtttggttttaagatagtaagatttataggattgtaaatgtttgttttataatttggttttgttggtattttgatgagtaagattggttttggttttagtgatgatcggttagtgaattgtattgtgtagttttagtaagttattgttagggttttggagggataaatagggagtgtatatataattttatattggtagtttttatagtattttgtaggattagagattgtgagataggttgggtttatggatgttaattgataaatattaaagtatatggatatagtttttattttgggaaggagaggtttgggtttgatttataagattttttttttttttttttatttgtatgaattttaaattaagttttaggtaaagatttcggttatagtatatataaggttggttattttttgggttataaattgaataggtggtttgattataagtataagtttttttttttttttttgagacggagtttcgttttgtttttaaggttggagtgtagtggcgtaattttggtttattgtaagtttcgtttttcgggtttacgttatttttttgttttagtttttcgagtagttgggattataggagtttattattacgttcggttaattttttttttttatttttagtagagacggggttttattatgttagttaggatggtttcgattttttgattttgtgatttattcgtttcggttttttaaagtgttgggattataggcgtgagttatcgcgtttagttttataagtataagtttttaagcgagtttttgtatatttataagtatggtataatagagttttagttatattgttttttgattaagtagtatgtgtatagtggggatatttttttgttagtgttttttttagtatggttaagggggtaataatattaaaataatgtatagtatatttaaatttagtaaggataaaagaggtttttatttgggggaggaggttgagtatagtgatagaataataggaaaatagttagtattataggaaaattattagttttaagatttttaattatatttatttgtttgatgagtttttaagttttagtcgtgtatagattagttagttttcggtgtgtgattagagtaaggtttgttgtttttttaaattttagttgtgcgtagattggttagttatcggagtgattagagtagggttgtcgtttttagtagtagtttggttttgttttaggattagtcgggttggatgatttgggtgttgttggttggtttatttgttttgagttgtcgattttagtcgattgtgatggagttaaggtacgatttttgtaattttaatagtagtgggagtggataagattattttgtggggtttattttatatgggttttagagaagttgggttttattttttaatttaaataaagttattaggtttaaagggtttattgggtttgttagatttttaggtatttttttatgtatttaattatgaatattttgtatggttgtttttaaagtttgtatttgattttttaaggttagtttttttagtttttggagattatttttaatttgacggtggttgattgaataaaattttatagggtaaatatttagtttgtttggtgggggtgcgtttggtttagaggaggattataggtaagatttgattttgttttagatgagttttttggtaatatttttttagtagttgtttgagtgtttggtttatgtattttatagtaaaataattttttttttttttttttttttttaattttgttttagaaaaaagaagtgtttaaggtttatttttttagttttagttatttagatagtgttattttataattgtttttgggttgggtatagtggtttacgtttgtaattttagtattttgggaggtcgaggtgggtagattacgaggttaggagatcgagattattttggttaatatggtgaaattttgtttttattaaaaatataaaaaattatttaggtgtggtggtgggtgtttgtagttttagttattcgggaggttgaggcgggagaatgacgtgaatttgggaggtagagtttgtagtgagtcgagatcgtgttatggtattttagtttgggtgataaagcgagatattatttaaaaaaaaatatatgtataaaattgtttttgaggtaagtttgttaagtagaaaaaaatttgtttttttttttttttttttaatttttgttttgttatattttaagttttagttttaattttttttaaagtaagtaaatgtaatatttattattattattattatttttaaatttttgttttagaatgaataaattatatgtatttttttttttgaagttatgtttttggattagggtagattttaggatatttaagtgaattttttgaggaatgtggatattgtaagtaggtgagtgtattattttttgtttttttttttttatagggtcgtcgtttatttttttttattttgttttttgtattgggaggtaattataataggtacggtttatgtttttgtattatttggtttttgtttgggtgtggatgataataggtatttgtaggagatgggagtatgcggggagaagtaatttagggtttttattttttttattttttttggatagttttgtggtttcgtaattattgtcgttttttatttatagttataggtatgtgggtttgtttttagtgaaagttatagatttttttgggttttggaaattgtttcgttcgttgtttttttaagttttaagatgaaaatagttttttgttaggaataattttagggagttttagcgttttttgtggtttttttagttttgtcggtatttgtgtagaaggtgttattttaggttagcgcggtggtttaaacgtgtaattttagtattttgagaggtcgaggtcggaggattatttgagattgggagtttaagattagtttgattaatatggagaaattttgtttttattaaaaataaaaaattagttgggtatggtggcgtatgtttgtaattttagttattcgggaggttgaggtaggagaattgtttgaatttaggaggtagaggttgtggtgagtcgagattatattattgtattttagtttgggtaataagagtgaaatttagttttggaaaaaaaaaaaggtgttattttttttttgttaggtttttgattgattatagggtgtttttataaaaggagaagtgataagaatgtatttaagatattgtattaatatatttatttatgatgttaatttaaaaaattgatttattataataaaagggaaaaataagagtattttggaaatagagtaagaaggaaggtaaaggtgaaaataattaatttggggtatttgagaagttttaagtgtagaggttgttttgagtttttagaggataagaaatagaatatacgatttaaaagtgagagatagagtttggtcggagtaggatgataacggtttttttatagagtattatttttgtaaatttttgacgagaggggtgagattaatatgtaaaaatatatatatataaagtggagttgagggtaggatggagaattgttatttttagttcgtgatttttatggatttggagaaagatttagtttggagatgtgtgaggttttcgatttggagtagtattcgtttttaaagattaggtataaattttagtatacggagggatttagataaatatataagaaatgattatagtaggaattttattgagtacggagtaaggttgtatattatttagtatttgtttttttatttgtttttttttttttatttgtttttgttttagtatagtaggtttttagaatttaaaaagagaatttaatttgtatgttttttttttttttttttttttttttttttttttttgagatagagtttattttttgttgttaggttggagtgtaatggcgtgatttcggtttattgtaatttttattttttggtttaagtaatttttttgttttagtatttcgagtagttgggattataggtagttgttattatatttagttaatttgtgtatttttagagatggggtttttattatgttagttaggttggtttcgaatttttgattttaggtgatttgtttattttggttttttaaagtgttgggattataggcgtgagttattacgtttagtttttatgtttttttaatagtttgtaatattttattatagttttaaagaaaggatatgagaataataatttatagagtaagatatttatttagagggagtgagttataggggagatttgggagggaaatattgtaatttttttatttttagaaaaagattgatttagggaaggggatatcgggtttggatattgggattatgtggaaggggttttgggatattaggggaatgggtttttttttttatattttttttgggttatgtttgggaggagatatagtttattagttgtgtagttgggggaagagaagttagggtttagagataaggggagttgagaataatttgtgttttgttggtttgtagaaggtagtttttaaattgtggagaatagtttgggatgatgaaaatgttttaaaattagatatggtgatttaaaaatttaaatatgtgaaaaattattgaattgtatattttaaatgggtgaatgatatgtgaattatattttaagaaagtttaaggaaagaaatataatgatgtgttatgataaatttattagaatttttaaattaaaattattgattattttaaatgttggtgcgaatatggattattaagagttgttatatattttgtttagtagtgtggtattatttttttgggtgggatattatatatatatattagtaattttatttttaggtatataattttgaaagatatatgtttattgtgttaatatatatgtgtaagaaggtttataatagtattgtttataatttttaaaatttgaaaataaataaaatgattataaataaagaaggattaatttaatgtgtggaattttatgaataataaatatgaacgttttagagatatttataataatttagtaaatatatatttgagttaaaataaggttttataagaatatatatagtacgattttatttgtattaaaagatttaaaatttatatgaagtttgagataatttatattgttttagagatgtatgtatgggagtaaagttttaaagaaaggcgtgaataggattattatgaaattaggatgagggtgaatttttatgatagtaaagggattgttattgttattaggattggtatggaaatttttgtgtgtttttttttttgatttttgttttttttttatatggattttttttttaaaattatttgttaaaatgtaaatataatttaggtattttatttttggttgtaatttatattgtaagattgttaaaaaaaaataatattagttatttacgtgtaattggaaaaattaatttttatttataaaagagatgggttgttttttatattacgaattagagaagagattatgaattgaaatgggaatttggaattgttattatttcgtaattatatttaggattttgtttatgaaatattggaatattattgtttaatttttttttgtagtgatggagtgtttatatttgagttatttattatggtatagatatagatatttatattttgtgaattttgagtatttgaaatatatggttggtgtaaataagaaattggtttttaaaatttatttaattttaattaattaaagtgtaaatagtgttatgtggataaggtagaattatagtgtcgagattagtttagttagggagattttaatttagtggcgttagaggaattaaagatatatatatagaaatatggcgtgtggggtgggaaatgaggagttttatagtttttattttagtaaatagttattgtgattagttgtttcgttttttttaggtttttttttattatttgtgatagttttttgatttgtttttaggtgggtggttgtgtttaacgggtgttgttcgtgatagttagggttttttttagtattagttttgatatggttgtaattagggggttttcgggatttttttggaattttttttttggtatttggtttatgataaggttttaggtgttttgatagtatttaaattggttgttggttttggtttggagaaatataagtataatttttatttaagttattattttatttatgttttaattttttgttattggatttttttattaaattagttgttttgtttttgtttttgtagttggtttttgtagatgttgtttagttgttgataatatttggtttttgggtagttttaaaaaatttaaagttaataatgttagatttagttgtgtatgggttgtttcgtaatttttgttttttttttttttttgtttttgttattagttgtttatttgtataaattataattgagtatttttaattaattgcgtggaatgaattatgtataaagaattagaaattatattaataggtatattaaaagtagttagtattttaattatagttataagttttgttttttgagttgaagtataggttgtttggaaagttttattttttgatttagaataagaagttttattattgttagatttatttgtgaaataatgaaaatgtttagtaggttgtagattgtttattataggaattgtaaatgtaaatcgtttattgttttgtttagttaagggtatagtaaagaaagagttttttttggttgtaatgtttttatagtttgtataattgaattaatggtttttaaattagttaatattttttatttatttgatttttttttaattataaaaatcggagaattttaaggggaaagtgttgtagttatgtttttattttttaattgtatattaacgaagttttttaaagtttttagtttttttttatttagtagttattgttttatttaaattggtttatttgttaattattttaaaggtataggttttggaggtttaataatgattgttattaaaaatgatattttaaattttggcgggaattttgtttttttatttgaagtatttttttttaaattttgtaaatttttttttagttttatattagggatatgttttattttatgtattatatgttgattttgagggttatataattgttttggaagtagaatttgtgttttttattgttgtaataaattttttttttataaatttataggtacggaagttataattggttgaatagttttaggttgtttatcgggatttttataatgtaaaatataatggttttgatatattttaggggttttattaattttaattgttttaagttgagtgtgttgaattggttacgtagacggttagtgttgtcgagaaatgattgaaatgttcgtttttgtatttattaaatttttatatttttttttttgaatagttattttataggtaggacgtttattagtaatttgatttatttaataagttgttttgttttgtttatttgtgtttttaaatttttttgtttgtttaattttattttttttatttttatatacggtataattaggagttgtgttatatatttttttggttttgttttttagggaatagaagtagatataataatttgaatttttttattgtaatttgaattaatgatttttgtatgtatttgtatgttttttaaatttaaattaggtttttttagaaataattttatcgttttcgttggtaagggtttatagatttttgttgggattttttgtagggtttttttaggtagaagttttatagtttttgtgtaatataaatttattgtggtgttattggttgtggcgggggatagatattgtataaggatgagggaatggtttgagttagaaatgtttcggtttggaatggggtttcgggatgggttttttatggtgttttttgaaattaggtttttatttttattaaatttagagtgatattgattagtttaatgttttttttttttgtattttggatatattttaggtttagtagtttttttttttttttttatatggtggtttgatttgttgattttttttatattgttttttagtgtgattatgttttaaatagttaaaataagttttaggaaatggagtattttttttatttatttttagttttgttattgtttgtgttaataaagtagttttatgtagattattttcgatatcgttataggttttgatataattaattaaatgtgttttttttttaataggtcgtaaagtagtttggtaatcgagattaatattgttaaaagttaataattgtaatattatattttgagtagttgaatttgaaattatttttttaagagatttttgttttaagagattttaagttataaaatttgtatatagtttttttggtttttgttttatagtattaaaggaagggtattgttttttatttgaagtgatttttttttaagttttaatgtatatttttttaagttgttttacggtattattttgtatgattatttgtgcgtttaaattagtttagtagtcgatttttaaaagttggtttatgttatattaatttgagtttcggtttgggtattgtaagtagtttgaatggaagttttatttgtttattaagttttaaattgtaagaattgagtaggatttagataagttcgaataagagtgtttttgttagtaggaattattcgattggaaatagtaatattttttaatagttttattataaaaggagaatttggtttatattgattaatagtttgtttaaattatttgagtaatttaaaaggaaaaggtttaaatgtagttataatatttttttgttgattaggtggtgtattttaatagggaattgttaagtttttatattattttttcgtttagtttgttgaatttttgtttgaatagaattgatagtagtcgttcgaggtgttgtttagttattggggtaattatttttcgtttagtgttttttagaaaagaaagatttggagggtttggttattttttttttttaaaataataatgagggggtgtagaagggtagggatgaattttttttttttgtgttattttagttttagttggtaaataaatttgttttgtaattttttttgttatttcgttatatttttttttttttttattattagtgtgaaaaagttttaaggtggaacgaattagagtttatatttgttttattgttattcgatgtttttaagttttttattttatttattacgaggattgtttaagagtatttgggtgttttttagtttagttttttattttttaattgttgttttggcgattttttaatttggattcgagtttttacgtatgggtgttgtttattgagattagtttggtgggggagattttaatttagtagagttagaggaattaaagatatatatatagaaatatagaggtgtggagtgggaaattaggggttttatagtttttagagttaagagttttgaatagagatttatttatgtatttattgatagtaagttagtgataagtattgtttttatagattatagattaattaaaagtgttttttataggaaataaagggatgggttgaaatgaagggatgggttttggttagttatttgtagtaggagtatgtttttaaggtatagattgtttacgttattgtttgtggtttaagaatatttttaagtggttttttattttgggtgggttaggtgttttttgtttttatttcggtaaatttataatattttagcgtgggtattatggttattacgaatatgttatagtgttgtagagattttgtttatggttagttttggggttagtttatggttatattttggggggttcgtttttaatattatagaaataaaatgtagtatttattattattatttttttgtttagttatttattatgtgaatgataattttattgttattaattttggaaagattttattttaaagaaaaatgggattttagtttttttagtggtagatttttttatatttagtagttaataaaatatttgaattttataaaaaatttttgtttatttttgttatttttgggtatagaaaaatgttgaatttttatttgtatgtgaaataaagtggttttttaataagaaattttgttataaggtaagaattttattttaaatataattttttttttttttttttttttttttttttttttttttttttttttttttttttttttgttttttgtttttgagataggtttttattttgttgtcgcgtttggagtgtagtggtgcgattttggtttattgtaatttttgttttttaggtttaagtggtttttttgttttagtttttcgagtagttgggattataggtgtttattattatgttcggttaatttttgaagttttagtagagacggggttttattatgttggttaggttggtttcgaatttttgattttatttttagagtattttttttatttattttttattagtatttagatatatttagtagttggtatgttttgtaggatagtttttggttatttattttattatgatttagtttagtattaaaggtttatagaatttttttttagtttgtaatttagaaataagattgatatttattttttgtttatattttttaagtttttataatagttttttttagataagattttaaggttagatatggtggttatgtttgtaattttagtattttgggaggtttatattatttggggtcgggagttcgagattagtttggttagtatggtgaaatttcgtttttattaaaaatataaaaattagttaggtatggtgataggtgtttgtagttttagttatttaggagattgaggtaggagaatcgtttgaatttaggaggcgaggttgtagtgagtcgagattatgttattgtattttagtttggcggtagagtgagattttgttttaaaaaaaaaaaaataaaaaaaaaaattttaataattagtttaaggttgaattgttaataataagatttgaagttaatatttaattaatttatttattttttagatttagggttttattttgttgtttaggttggtatgtagtggtattattagagttttttgtagttttgaatttttgggtttaagggatttttttatttagttttttgagtagttgggattatagatgtgtattattatgtttagtttaatattttattttatttgatagtagagtgaagtatttgtattataaaaataaaatatatataaattataataattttgttaatttaatatatgatttcgaatgatagttaaattaggagttagttagttatttttagatatgttttttaaagtgaaattttaaaggtagtgttattgtttatttttattaatgtttataggtttagttgtggttttgttatagagtttgttaagaaaatttttttgagttgttttaaatggttttattaaagttaaatattgaaattttataattattggaattgggaataaaagatatatttttaggttttattttattataaattaaaattttagtgattgtaggattatttttttttatggattttttttaatatatttaaagtatagataattgtgtttaattagttgtattttatgttgaattatttgattatgtgaggaaagtatatttttggatttttattttattttgattagagggattagtaaaaatttggaatgaagaagttttttatgtgtatattttttttttttgtgtgtattgttttttatttatatttttgtgtatttatatatttgtgattgtacgttttggtattgatttagaattatttattaattttatagttaagttaataaaatgttattgggaattaaagataaattttatatgtatttttttaaaatttattatttgatttatttatttattttaaatttatgttaaatgttattttttaaattttatgttttattaaagttgattttatttattaatttaattaaaagttattgaagtttatagtaagaggtattaaagaaggtagaatgtttttatttgttttgggattaacgggggtagaaagatgggaagggtagagggataagaggttttatagagatagataagatataaagatatttgtttttttggttagaaattaatttttaggatttaggatttaggagtaaagtgttttaataattagaaggttttttggttttttttaaatttagtgtttatttggttagggataaggtttttatattttttgttttgaggatttaagtttagaatgtggttgtttttgggatattttatgttaaagaaagtttagtaagtgtagataaagagtttagagggtattagttatttttttatggaattttgtttaaggtaattttttgtgttttgttatttatattggtcgcgtttttaggaatttagcgaaatggttatgttgtttttgagtggaagtgaggggaggttattgggtagttagagattttgaatttttgttttttttttttttattttaattagaggttatttgtggaagtttaagaaaaaaagatacgaatgttagaggtgaatttaggtttatgaatttattgtggttacgggattgaagttacgtggtttaatagtaatgaagtttatgaggttttggtaattttaaagtttttttttaattaggagttgttttttattgttattaggtattttaggagttggatatgtggtattttttgttatgtttgatgaggaattggagaggttttatagtatatagattttgatcgaattcgagttagagtggagttaggtaaaattttgtattgatttagaggtatttatacgtgaaataaagtttttatttagagtttttattagagtattaggtttagtagtaatttttttttgttgttgttgtatttgttttgtgataattggtgtttgaaggaaggagaaattattatgtgtgtaggaaagtatatgtaattagaaaattgggatatgatttataaggtaggagggatttttttttttttcgtggtagatgtgggattttttgttatttttgttttgatgttttaagtgtataaggtgaatttttttgtttttagttgagtgattaatattgggagttggaatttagagaaatagtggtagtttttttttttttattttttattttagtaaatttaaggtaagggtttagggtttttgtattttatttttattatgtattttttttttttggttaagaaaataattaaatggttaggcgtggtggtttatatttgtaattttagtatttcgggaggttgaggtgggaggagtatttgaggttaggagttcgagattagtttggtaaatatgatgaaattttatttttattaaaaatgtaaaaattagttagatgtggtggtatgtatttgtaattttagttatttaggaggttgaggtatgaggattatttgaattcggaaggtggaggttgtagttagttgagattgtgttattgtattttagtttgtgatagagtgagattttgtttcgataataataataataataataataaaaaaggaaataaaaaaagagaaaataattaaatgtataaaaattaaggttgtaattttgtaatttttgtggtatttagaatattggattagattaagggtgttaggtgtttgttattgttttattatttaacggttgtgattttaggagaatttttttaagttttggtgtttgttaatttatttgtgagttatggataaatatatttattttagtgagaataaatgaaaatatattttatttttattgagatgtagtgagtgttgttttagtattaaggggtaaatgtagagagaaatattagtttaggatttttttttttttgagatggagttttatttttgttgtttaggttggaatgtaattgtatgatttttgtttattgtaatttttttttattgtgtttaagtaatttatttattttagttttttaagtagttggaattataggtttgtgttattatgttcggttaatttttttgtatttttagtagagttagggttttattattttggttagattggtttttaatttttgattttaggtgatttattcgttttagttttttaaagtgttaggattataggtgtgagttatcgtgtttgattattagttcgggattttaagaaatatttttaaaagtaggaagaaagtatataatatttgtaaagttttgggtaaaaatttttttttattttagtaatgattataaaataattattttttataatttttagaaaattagaggaaaatttatttttttaatattttaagaaatttaaatatagatggtgattatatattagattggaattataagttttgttttgagtaaaattgaaaagaaatggggatatttttatttttgagtggtgattatgggatttaaagtggtttgtaaatgattttttattatttatatttgttaatttttaattgatttatttattttttagaaatttttgataatttataattttgaaaaaattttatgtttagatattaggtagggtaatatgtttgttttaatttgttagggttgttataataaagtattatatattgggtgacgtaaagaatagaaaaattattgtgttatagttttagaggttggaagtttaagattttggtgttggtagtgtatattttttttgaggtttttttttttggtttgtagatgtgttttttttgtgtttttatatggttatttttttgtattagtttatgtttaattttttttttttataaggatattagttatattgaattaagatttatttatatgattttattttattttaatgatttttttaaagatttttttaaatgtagttatttttttaggtattgggggttaggatattaatatgttaatttttggagagatgtaatttagtttataatagtttggattaatttggagattttttttttttttttttttttttttttttttttttttttttttttttttttttttttttttttttttttttttttttttttttttttttttttttttttttttttttttttttttttttgttttttttttttttattgagatggagttttgttttgttatttaggttggagtgtagtggtacgatttcggtttattgtaattttcgttttttaggtttaagtattttttttgttttagtttttcgagtagttgggattatagatgtttgttattacgtttagttaatttttgtatttttagtagagatggggttttattatgttggttaggttggttttatatttttgattttaggtgatttatttatttcggttttttaaaatgttgggattataggcgttagttatcgtttttggtcgagattgcgttttttaaagagtaaaatagagtaaatttttttggtttaattttgttttttaatattttgaaattttgtttttgtagtgagaataaaaaaaaaagatagttaaaggttggtgttacgtagaaggtgagttttttttaattttggttgttttaagacgtagtgttgtgttatttttgaaagtttgttttattttagtgattttggttttagtttttttattgggaagaggatttttttttagaggaaaaattttttttgttatgtaggtttattttttttatatttgtaggataaaaaagttgatgtaataaaaagaatatatttgtgaaatttttgtggtaattattttgatatttttattaatattttatattgtgatgaatatgttggttttattttggtagaagggatatgatattggatattttgagttataatttttttgggtttttttatgggatttagtttttgttttggtaggtgaagggagagtttttggtgtagggtttggtttttataataaattatgtttttggggtagtaggtttatttttggaagtatgaagtttagttaggagtgcgatttttttttttatttaaaaggttaaggtagagtaggtttttgtttagggcgtagtgagcgagagaagggaaagtgatagagtatttttttatttttttgtgatatgtatgtatttaagtttttggtgttttaaataattgaaattgagatttagatttatttatttgtaaagtagaattgtggagaaggaagtatattattttcgttattggagagatttttgaagagagatttgtgagtttttattttatcgaaaatgatataaaattttattaaaataaagtgaaattgtggttgtagatggggttttatttagagttttgatttcgtatttgttttttaagatatggtttttttttaggatattatagaattatagggtttagattggaggggtaaggcgtgatggtgttttttttttttggtcgataggatgttttggattgtatgtattttttaaagacggttgtagaagtattttttattatattttgttttttttagtttgatttattatttttttattaagaggtaagttttttttatttttttaaatatgagtagatttgatatttgcgttagttaataaaatagggtagaaacgtggttgtgttagttttgggtattgttgttaattattttgtttgtatttggttttttttattttaatttttgaattatgttaaattttaaggttattatttgagtttagttaatatatagaattttatgagagattattaaaaatttttagttattatttttaggaatatttttttttatttttttatttttaatttgtatgcgtttttagatttaaagtgagtattttgtagttagtatatggttagaatttttttattatatttattgtgataattttaattttgattggggagtttaatttattatatttaaagtaattattgatgaagaaggatttatttttgtaattgtgatggttttatgtatgttttatagttgtttcgttttttattttttttattttaatttttttttgtgtttagtcgatttttttttagtgatatgttttaattgtttttttatttttttttgtgtatattttatgtatattttttttgtgattattatggtattgtatataataatataattataataattttgaattgaaattagtatgaaattttgtttttttatatttttttttattttttattttatattattgatgttataaattatttttttgtaggttagtaggttggaaagttataatgttgtagtttttagtttaaaatttgtaaattaggttggtagattggaaatttaaattgtagttgttattgttattttgaggtagaatttttttttttttgagaagttttatattttgtttaaaggtttttaattgatttaaaaagtttcgtttatatttttgagggtaattttttttttataaaattaattgatataagattttaattataagtgtaaaatattattatagtaatatataaattagtgtttgattaaataattagatattatggtttagtaaaattgatatataatatttattattttagtttatgtttgtgaatttggtatttattaacgtttttttaaattatatttagtttttaaataaaaataattataaagttatatttttgttaaagatgatatagttattttgtatttatttaaaaatattaattatttttttagaaaaaaatttaaatttaatgtatgataagtattttttttttcgatatattgtaatttaaatattatgtttaaaaaaagttgaattattattaataaaagggaattattattagtatattttatgttttattataagatgataaggaaaagatgaaaataaaggtatttgtttagtatatgtatgggtatatatatatagatataaatattattgtaaaaatataaggaagaaatgtttataatatttattgtttttatttttgtaattgattatatggttatagttggttatttatttatttatttatttatttatttatttgatatagggttttgttttgttgtttaggttggagtgtagtggtattattttggtttattgtaaattttattttttgggtataagtgatttttttattttaattttttaagtagttgggattgtaagtatattattaagtttgattaattttttgtatgtatttttagtagagatggaattttagtatgttgtttaggttggttttatattttttaatttaaggaatttatttgttttagttttttaaagtgttggggttataggtatgagttattgtgttggttataattagtgtaaatagtttttttttattaattattttatagttttattgtttttagtaagttcgttagttgattaggtttttttttttgtttgggtgatttatatttttatttttgaagggtatgggttattagtagttttgtttgatttgggttgttgtagtttttattgattttaattatagagtagagtattattaagagatgttttaaaagattttttgtattttaaatatagttttatttattgttattgtgtagtagtagattaatttttttttgatgattaggattaattattttagaaagtgtagtaatttttttttttgtttgttgatttagtaatatgaggagttgaagggttcgggtgggtgttttagtttttagtttaatggaataatttttgtgttttttgagggagtatttttttttttggtaaatttttagattttgattttatttttcgtgattggataagattttttaattagggtttttagtattttttataggtgtgtttgggttggtaataggtttgtatttttttgagatagagtttttaaaggaaaaggtagattattatttttgttgttatgtagtttttattggtgatatttttagttattggaaaatttgaggtaattggggattggagtaggtttttagtaaattgtagtagttttatagaaaagtggttagattgttgaaagagaaaataaaagaagagaaaaataaaatttatttatagattagtaattttaaagaatgaaggtagataagtttattaagatgagaaagaattagtataataatgttgaaaatttaaaaagttagtaagggtttggaattaggttaaagttgagatgattgaaagagtagaagtagaatttagaatatggagagggaagaagtttattgtgttaaaggagtatagtgtgatttaatttaaggaagttaaaaataatgataaaatattgtaggagttgatagataaaatagttagtattatagaagaatgaaattaatttgataaagttgaaaaatatattaaaagaattttatagtgtatttataagtattaatagtagaatagaataagtggaggaaagatttttagtgtttgaagattagttttttaaaataagataggaagataagaatagagaaaatagaatgaaaaggaataaataaaatttttgagaaatattagattatgtaaagaaattgaatttatgaattattggtatatttgaaagagatgggaataatggaattaatttggaatatattttaagatattatttatgagaatttttttaatttagttagatagattaatatttaaatttagaaatgtagaggatattagtaagttattttatgagaagattatttttaagatataattattagattttttatggttgaaatgaaagaaagaacgttaagggtagttagagagaaaggttaggttatttataaagggaagtttattagattaatagtggatttttaagtggaaattttatatattagaagagattgagggttagtattgaatattgttaaagaaaagaatttttaatttataattttatatttagttaaattaagttttataagtaaaaaagaaataaaattttttttagataaataaatgttaagggaatttattattattagatttgtattataagaatttttaaaagaagtattaaatatggaaaggaaagatagttattagttattataaaaatacgttgaagtatatagattagtgacgtaataaagtaattatataagtaagtttgtaaagtaattagttaatattatgatgataggattaaatttatatatattaatattaattttaaatgtaaatgggttaaatgttatatttaaaagatatagaagggtaagttggataaagaattaagatttattagtatgttgtttataatatatttattttatatttaatgatatatataggtataaaataaagagatggaggaaaattttttaagtaaatggaaagcggaagaaagttagggttgtaattttagtttttgataatatagattttaaattaagaaagataaaaaaagataaaggtgggtattatataatggtaaagggtttaatttaatgaagagatttaattattttaaatatatatgtatttaatagaggaatatttagatttataaggtaggtttttagagatcgttaaagagatttagaattttatatagtagaagtggtggattttaatattttattgataatattagatagattattaagatagaaaattaataaagatatttaggatttgaatttagttttggagtaaatggatttgatagatatttatagaattttagattttagaataatagaatatatattttttttattgttatatggtatttattttaaaattaattacgtaattagaagtaaaatattttttagtaaatgtaaaagaattgaaattataataaatagttttttagattatagtgtaattaaatttaaaattaagaataagaaatttattaaaattatataattatttagaaattaaataatttgtttttgaatgatttttagtaaataatgaaatttaggtagaaattaagaagttttttgaaattaatgagaaaaaagatataatgtattagaatttttgggaaatagttaaggtagtgttaagagggaaatttatagtagtaaatgtttatattaaaaagttagaaagattttaagttaataatttaaaattaaatttaaaagaatttaagaatgaagagtaaatatatttcgaagttagtagaagataagaaataataaaaaaaattaataaaagtattgttttttgaaggagatagagatataaaaaattatttgaaggattaataaatttaggaggttttttaaaagaaattaataaaatagattattagttaagttaataaagaagaaaagagagaaaattttaataaatataattagaaataataagaggaatattattattgattttatagaaatataagaaattattagaaaatattatgaatatttttatgcgtataaattagaaaatttagaagaaatggataaatttttggatatatatatcgtttttaagattgaattaggaagaaatgtaatttttgaaaaaataatgagttttgaatttgaggtagtaatgaagagtttattaaaaaaaaaaaaaaaagtgtaggattagatgattgataggtgaattttattggatgtataaagaagagatggtattatttttattgaaattatttttaaaaaatgaggaggagagatttttttttaatttattttattaggttagtattattttgatattaaaatgtggtagagatataataataataaataagagaaaatattaggttagtatttttgatgaatattaatgtaaaaatttttaataaaatgttggtaaatcgaattttgtagtatattaaaaattttatttattataattaagtaggttttatcgttaggatgtaaggttagtttaatatatgtaaattaataaatgtgatttattacgtaaatagaattaaagataaaaattatatgattgttttagttgatgaagaaaaggtttttgataaaatttaaattttatttatgtttttaaaaaaatttttaataaattaggtgtttaaggaatatattttaaaataataaaagttatttatgataaatttatagttaattttatattgaatgggtaaaattagaagtattttttttgaaattagtataagataaggatgtttttttttattgtttttgtttaatatagtatcggaaattttgattagggtaattaggtaagtgaaattaaaaaaaaaaaaaaaaaaaaagaaggatgtttaaataggacgagaggaatttaaatgatttttgtttgtagatgatatgattttataattagaaaaatttatagttttagtttaaaagttttttaagttgataaataattttagtaaatttttaagatataaaattaatgtgtaaaaattattagtatttttatatattgataataggtaagttaagagttaaagtaggaatgaatttttatttataattgttataaaaagaatataatatttaggaataatgttaatttgggaggtaaaagatgtttgtaaggagaattattggttttaaaaagtgtgtattaatgttagtagtagttatgataggttgggtggaatgtttataggtggtgtttgtaggtaggtgatagttaaggtgatagtatttaatttcggttatttaggaggagtttttaggtgtttatcgtggtggattgggttgagtaatttttaggattttgggttgtgttttttgttttagtggaaaaaggaaatgaagttgtttttttattattaaatgttgtgttaattagttttttaattttttttttgtttgaaggattgaaatatttattatagtttagatttgttagttataattttttttattttttatataattaaaatttatttttcgatagttatatttatggtatgttaattggttaattagtttgatttaattattatatatggtatatatatattagtatattatataatattttatgaatgtattatgatttgttaatttaaattatatatatatatgttttagaaaggtattattttttgggaatagaatttagttttatagtattttttttttaggattttaaagatgttgtttatttgtttttttatttgtattgtttttagtgaaataacggttgttatttttattattatttttatgtttttttttttattttttgtttatttatttttttttttttttgtttttaataaatatatgttttttttatttatagttatagaatgaatttgagtaataatttataggaatggttttttgattgttggttgaaaatttttagaaatagttgtttgttttttgttttattaggataaaggttaatttttttagaatatttttaaattgaagaatgttataattaattttatttgttattttggttgaattatagtgtttagataggtgattaagtattattttggatgatttgtgagaatgttttttggataatattaatgtaaaataattagattttgagtaaagtagattgatttttataatgtgggtgggttttatttaatttattgaaggtgtaaattgaataaaatattgattttttttgagtaagatggaattttgtagtagatagcgttgggatttgaattgtaatattcgttaattgattttaaatagttggttggtttgtgtatagtatttggaagatgaatggataatattttgtttggaagtttatcgttttgatcgaagaagataaaaatagaataatttttgtgggttgaattgtagggtgttttttagtagtagtggaagaattgaataataataaagtttttatgttttagtttttattgatttataggtagtgattaatggtttggttatataattaattaggaaagtaaaggaaaatttgttgatgaaaagagtgtttaaatgagatatagttttatggaaattacgatggtaatttgagaggtttattaatgtaagatacgttgatgtttgatatagagtggatgttgtttttgttcgaattttatgttggatggaatttttagtattagaggtgggatttgtagggaggtgattggattacgggggtagttttttatgaatggtttagtatcgtttttttagtgtttattaatgtttattagaataatttttttttaggtttggaaggtgattgaaataaataagtatttatttttaagtgtttgttaggtgtatttgtaattttagttatgataatagttgaggtagaaggatattttgagtttaggagttagagtttggtttgagtagtatttgagtttagttagagaaagatattaagattatatttaaaaaaaatttacgtttgtttgtggtgattttttgggtttatgaaataagtagatattggggttgtagtaatgtagagagagatggaattaaggtatattttttttgtattttttatattataggtataaaatatatataagtgttttttttaataaaaaaaaagagagagagatagagatagtatatggttatgtggtagatttttttatgggaagattttgaaaatatagagttggtaagttatattgatattagtagttttaggaagtagtaaatgggttttggtagtaatagatacgtattttggagttgggtattgtttagttgttggtagatgtgttattaaatagaattggagtttatttattaggggtagtaaaaataaatatttatattgagattttgtagtgagataaaggagggtatttatttgtagggtgttaagtaaggagaattagttagtttatagttaagatttaatttttttaatggtttataagtaaggttttttaaagataggggtaaattttaggaaagtagagttataggtaatattataaattaatgtatagaagttatatattggtttggttttaaaaggaggaatattttgatgagggagtttataagtcgtagatagagataaagattttttgatttgtgatttataaggaagtaaagtttttttatatagttgggggtagtagagaggaatgtttaggtttggtttgtgggttttattttttttaggttttttaggaagaaatttagaataaagaatagtggttagagtttagtttttagtttttttttatttgaggtttttttgttagtggatttattaggtgggaatttgagtttttgaaaaataatttagggatatatattaagatgttttttttagtttttatagagaatttaatattttgtgattttaatttttttggttatcgttttaagttattattatttttttgtttataaggttatttatttattttttagggttggttaggtgtttggaattttttttgaaggaattgaaggtttttttttatttttatgttgggaggttttggtaggtttttaagagaggtttttgttttattttagatgtaaatgtttagagtgttattaagagtttgaatgggaggtattgtaattatgtggattattgagttatatttttttatattagaaaatgcgtttgtttaaaattttagaaagatattttttttagaggaagagttttataaagaattaaaatattttattgaaatattggttgtataaagtaagagtggggaaataagtatgaagggtgggtttatatatttttatgagtgtgtttatatttgatatgaaagtatttttttttttttttgtggattaggggaaggtgttggtgtgatttatatataattttttttaaggtgggaggatattggaatgatgattgtattttattttaatttgttttttttatatttgatgtagtggttttaggattagggatgtaaataaaagtttagaaataggaattatttttaagtaagaaattgtaaatatattttgtgtttattatgtaatgatttttaagggtttggagaagtaggttgtgtttttagtgtatttggtaaagttggggttaatattgaatgtagttgtattgtttggggttagttagttaattagttttttattgtataattttattttttatgaattggaatggatgatgtaagataattgttagaatagtattggttcgtgtagtttaggttagtatagtagtagaattttatgttttttttataattagaaatgtttggtataaatgaagagaaggagaaatagtagttgagggtaaatgaatgaataaatgggttatgtaatgaggaaaatttaatgttatatgaattatttaaaagagatataagtaagagatgatattgttttttaatttaattttattaaatgtttgaacgggtgtagttttatgttgttgagattatttttgttttggggttgtatcgggataatttttttttattatattttaagttttagggtatatgtgtataatatgtaggtttgttatttatgtgtatatgtgttatgttggtgtgttgtatttattaattcgttatttgtattagatattttttttaatgttattttttttttttgtttttattttatgataggttttggtgtgtgatattttttattttgagtttaagtgttttgattgtttaatttttatttatgggtgagaatatgtagtgtttggttttttgtttttgtgatagtttgtttagaatgatggtttttagttttatttatatttttgtaaaggatatgaatttatttttttttatggttgtatagtattttatggtgtatttgtgatatatttttttttttttttttttttttttgagatggagtttcgttttgtcgtttaggttggagtgtagtggtgcgatttcgtttattgtaagttttgttttttgggtttatgttatttttttgttttagttttttaagtagttgggattataggtattcgttattatgattagttaatttttttgtatttttagtatagacgggtttttattgtattaggtaggatggttttgattttttgatttcgtgatttatttattttagttttttaaagtgttgggattataggtatgagttattgtattcggtttatgtgttatatttttttaatttagtttattattgatggatatttgggttggttttaagtattttttattgtgaatagtgtaataaatatatatgtgtatttatagtagtatgatttataattttttgggtatatatttagtaatgggatggttgggttaaatggtatttttagttttagatttttgaggaattgttatattgttttttataatggttgaattagtttatatttttattaatagtgtaaaagtgtttttatttttttatatgttttttagtatttgtggttttttgattttttaatgattgttattttaattggtgtgagatagtatttttttttggttttgatttgtatttttttgatgattagtgatgatgagtatttttttatgtgtttgttggttgtatagatgtttttttttgagaagtgtttgtttatattttttgtttattttttgatggggttgtttgatttttttttgtaaatttgtttaagttttttgtagattttggatattagttttttgttagatgggtagattataaaaatttttttttattttgtaggttgtttgtttattttgatggtagttttttttgttgtgtagaagttttttagtttaattaaattttatttgttaattttggtttttgttgttattgtttttggtgttttagttatgaagtttttgtttatgtttatgttttgaatggtattgtttaggtttttttttagggtttttatgattttaggtcgaatatttaagtttttaatttattttgaattaatttttgtataaggtttaaggaagggatttagttttagttttttattatggttagttagtttttttagtattatttattaaatagggaattttttttttattttttgtttttgttaggtttgttaaagattagatagttgtagatgtgtgatattatttttgagggttttgttttgttttattggtttatatttttgttttggttttagtattatgttgtttttgttattgtagttttgtaatatagtttgaagttaggtagcgtgatgtttttagttttgtttttttggtttaggattgttttgataatgtaggtttttttttggttttatatgaattttaaagtagttttttttaattttgtgaagaaagttattggtagtttgatggggatggtattaaatttataaattattttgggtagtatggttatttttacgatattgattttttttatttatgagtatggaatgtttttttatttgtttatgtttttttttatttcgttgagtagtggtttgtagttttttttgaagaggttttttatattttttgtaagttggatttttaggtattttattttttttgaagtaattgtgaatgggagtttatttatgatttggttttttgtttgtttgttattggtgtataggaatatttgtgatttttgtatatggattttgtattttgagattttgttgaagttgtttattagtttaaggagattttgggttgagatgatggggttttttaaatatttaattatgttatttgtaaatagggataatttgattttttttttttttaattgaatattttttattttttttttttgtttgattgttttggttagaatttttaatattatgttgagtaggagtggtgagagagggtatttttgttttgtgttagtttttaaagggaatgtttttagtttttgtttatttagtatgatattggttgtgggtttgttataaatagtttttattattttgagatacgttttattaatatttagtttattgagagtttttggtatgaagggttgtggaattttgttgaaggtttttttggtatttattgaaataattatgtggtttttgtttttggttttgtttatatgttggattatgtttattgatttgtgtatgttgaattagttttgtattttagggatgaagtttatttgattatggtggataagttttttgatgtgttgttggattcggtttgttagtgttttattgaggatttttgtatttatgtttattagggatattggtttaaaatttttttttttttgttgtgtttttgttaggttttggtattaggatgatgttaattttataaaataagttagggaggattttttttttttttattgattggaatatttttagaaggaatggtattagtttttttttgtatttttgttagaatttggttgtgaatttatttggttttggattttttttggttggtaggttattaattattgttttaattttagagtttattattggtttatttagggatttaatttttttttggtttagttttgggagggtgtatgtgtttaggaatttatttattttttttagattttttagattatttgtatagagatgtttatagtattttttgatggtagtttgtatttttgtgggattggtggtgatattttttttattattttttattgtgtttatttgatttttttttttttttttttttattagttttgttaacggtttattaattttgttgatttttttaaaaaaattagttgttggatttattgattttttgaagggttttttgtgtttttattttttttaattttgttttaattttagttattttttgttttttgttagtttttgaatgtgtttgtttttgtttttttagtttttttaattgtgatgttaggttgtcgattttagattttttttgtttttttttgtaggtatttagtgttataaatttttttttatatattgttttaaatgtgttttagagattttggtatgttgtgtttttgtttttattggttttaaagaatatttttatttttatttttatttcgttatgtatttagtagttatttaggagtaggttgtttagtttttatgtagttgagtggttttgagtgagttttttaattttgagttttaatttgattgtattgtggtttgagagatagtttgttataatttttatttttttatatttgttgaggagtgttttatttttaattatgtggttaattttggaataagtgtgatatggtgttgagaagaaggtattttttgttgatttggggtggagagttttgtcgatgtttattaggtttgtttggtgtagagttgagtttaagttttggatatttttgttaattttttgtttcgttgatttgtttaatgttgatagtggggtgttaaagttttttattattattgtgtgggagtttaagtttttttgtagttttttaaggatttgttttatgaatttgggtgtttttgtattgggtgtatatatatttaggatagttagttttttttgttgaattgatttttttattattacgtaatggttttttttgttttttttgatttttgttggtttaaagtttgttttattagagattaggattgtaatttttgttttttttgttttttatttgtttggtagatttttttttatttttttattttgagtttatgtgtgtttttgtacgtgagatgggttttttgaatatagtatattgatgggttttgattttttatttaatttgttagtttgtgttttttaattggggtatttagtttatttatatttaaggttaatattgttatgtgtgaatttgattttatcgttatgatgttagttggttattttgttcgttagttgatgtagtttttttttagtatcgatagtttttataatttggtatatttttgtagtggttggtattggttgtttttttttatgttagtgttttttttaggagtttttgtaaggtaggtttggtggtgataaaattttttagtatttgtttgtttgtaaaggtttttattttttttttatttatgaagtttagtttggttggttatgaaattttgggttgaaaatttttttttttaagaatgttgaatattggtttttatttgtttttggtttgtagagtttttgttaagagatttattgttagtttgatgggtttttttttgtgggtaatttgatttttttttttggttgtttttaatatttttttttttattttaattttattgaatttgataattatgtgtttttgggttgttttttttgaggagtatttttgtggcgttttttgtattttacgaatttgaatgttggtttgttttgttaggttggggaagtttttttggataatattttgaaaagtgttttttaatttggttttattttttttgttatttttaggtatattaattaaatgtagatttggtttttttatatagttttatattttttggaggttttgtttatttttttttattttttttttttttaatttttttgtttgttttattttatttatttgatttttaattatcgatatttttttttttatttgatcgaattggttattgaagtttgtgtatgcgttatgtagtttttatgttatggtttttagttttattaggttatttaagtttttttttatgttgtttattttagttaattatttatttaatttttttttaaggtttttagtttttttgcgatgggttcgaatatttttttttagtttagagaagtttgttattattaattttttgaagtttatttttgttaatttgttaaagttattttttatttagttttgttttattgttagggaggagttgcgattttttggaggagaataggtgttttgatttttagaatttttagtttttttgttttggtttttttttatttttgtggttttatttatttttggtttttgatgatggtgatttatagatggggttttggtgtagatgttttttttgttgatgttattttttttgtttgttagtttttattttaatagtcgggatttttagttgtaggtttattggagtttgttggaggtttattttagattttgtttgtttgggtaatattagtagaggttttagaatagtaaatattgtagaatagtaaatgttgttgtttgattttttttttggaagtttcgttttagaggggtattcggtcgtatgaggtgttattcggtttttattgggaggtgttttttagttaggttatttagaggttagcgatttatttgaggaggtattttgttcgtttttagattttaaattttatgttggtagaattattgttttttttaaagttgttagattgggatatttaagtttgtagaagtttttgttgttttttgtttagttatgttttgtttttagaggtggagtttatagaggtagataggttttgttgagttgtagtgggttttatttagtttgagttttttgttattttgtttatttagttaagttttagtaatggtagacgttttttttttagttttattgttattttttagtttaattttggattgttgtgttagtagtgagtaacgttttatgggtgtgagatttattgagttatgtatgggatataattttttggtgtgttatttattataattgttggaaaagtatagtattagggtgggagtgtttcgattttttaggtattattttttatggttttttttggttaggaaagggaattttttgagtttttgtgtttttttggtgaggtaatgttttgttttgttttagtttatattttgtgggtaatatttattgtgtgataagttttaatgagatgaatttagtattttagttggaaatgtagaaattattcgttttttgtatcgtttacgttgggagttgtagattggagttgtttttatttggttattttggaatgattttttttgggataattttttatgattaaaaaggattttggtaatgtgttaggatttttttattgttatgatttttttggtataggagatttgtgattggttaggtatagtggtttagatttgtaattttattagtttcggaggttatggtaggaggattgtttaaggttaggagtttgaaattaattggggtaaaatagtgagattttatttttataaaatttttaaaaaattagttgggtatgttggtgtgtatttgtaatgttattgtttaggaggttgaggtaggaggattatttgagtttaggaatttaaggttataatgagttatgattgtgttattgtattttattttgggtaatagagtaagattttgtttttgaaataaataaatattataaaaagagataatgtggttaaagattagggtgtgatttgtggtttaataaaaatatttggtttttttttttgttttttgataagtaggttttaaaatatttgtaatttttttagtgataagtatgattttaatatgttaatgagatgattatggggtgaggggtttttaaatagttttaggatgggggttggttgttagaaatacgaagttgtgattagaggattggaaattttagtagtattttttatttttgagaagtaaagggggttggaagttgagtttagttattagtggttattgatttaattaattttgtttatataatgaaatttttatagaaatttttagagattgggttttggagagttttttaattgttgagtatattcgtgtgtttatgtgttgggaggatggtgaattttatttttatggggatagaggtttttgtgtttagagtttttttaggttatattttgtgtatttttttatttggttgtttatttgtattttttataattgttatggtttgaatgtttttttagaaaagtattttttggataatttattttgaatgtaatatttttaagaggtgggatttttgagaggtgattggattattagagttttgtttttattaatgaattaagtttgattataaaaggatttgaggttgtgagtttgattttttattttttttattttttatttttttttgtttttttgttttttattaggtattgtttttggttttggaatttttatttttaataattatgaattaaataaatttttgttcgttttaagttatttagttttaggtgttttattatagtggtataatttaaattaagagttcgtaattttcggttgtggattggtataggtttttggtttggtaggaattagattatatagtaggaggttattggtgggtgagagagtatgagtatgattatttgagttttgttttttgttagattagtggcggaattagatttttataagagtatgaattttattgtgaattttgtatgtgagggatttaggttgtatgttttatatgaaatagtaatgtttgattatttgaggtggaatagttttatttttaatttatttttttttattttttgttatttttgttggtttatggaaaaattgttttttatgaaattggtttttggtgttaaaaagttgggattattgatttaagttataataataataaattataatattgagtgtgaaagaaaaataaaatttagggacgttaaatttattatattaaagggataagttaagtttggtaattgagtgatggaaaaatcgttttttttttgtttttaaataaataattgtaaagatagaggaatatatatttttttaggtggttttttttataaattgtttattagataattttttgtgggttttaatatttttattttaaaatagagttttgttgaattttattttaataatgtaaattaatagtttatttttataggtgaaggataaagataagattagaaattatttttttatttatttggagataaatgtgtatttgatttttttatttaatatttattttgttttatgtaaaatgtagatttattgagtattcgatgaaagtatagttgattgtttttttttttttttttgtttgtttttttttttgtaaatattaaagtttttaaaatttttttagtaaaaagtatgggttatagatgttataataatttgtgtttttgtttttaaggtatatttttagtttggtaaaataaatttttaaattgattgatatttgttttagatgttttttggtttatatggttatagtaattttttgagttttttgagttagtttaagaatttttaaattttgggaggtgagaaatttttgattttgtagttatgatagatagaagtgtaggtaatttggaattcgataatttgtgatttgtatttgaagtgaggatagatttgtgagattgagtttttaaatttgtggagtttgaggttaattttaggtagttagtgttagaattgagttaaattttaggatttttaattgttgttggagaattagaaaattatttggttggaggaaaattttattattattttatagagagaaatttatagtatattgggggaatttatttttaatattttaatataggttttttttattttttataagtgtcggttagttgagaaataaagaaagatagtataaagagaggaattttatagttgggttattaggggtgatattatatatcggtaggattatgatgtttgtttgagttttagattaataagtttttattaagggttttaaaaggggagggggtgtaagaataaggagtaggtaaaaagttatatgtttttgagtgtaaaaagtagaattattaataagagtttaataaagattatatgtttttgagggaataagataaagggtaaaagtagaattattgataagggtttatgtttagtagtgtacgtattgttttgataaatattttaaataatagaaaatagggtttgagagtagagaagtggttagattataagtttattagggtagagtttttttttattttagtaagtttgagggttttgtaggagattagggcgtattttagtttttattttaattgtataagatagatatttttagagcggtcgtttatagatttttttttaggaatgaattttttttttagtgtattaatattaatattttttgttaggaaaagaatttagtgatattttttttatttgtacgtttgtttataggttttgcgtaagaagaaaaatatggttttttttgtttaatttcgtaggtagttagattttatggttgttttttttggttttataaaaattgttgttattttatttttttttaaggtgtattgattttatattgtttaaatatacgttttataattaaattgtagtattattattatagtggttttaaggtgacgtatatttttagtttatgaagataataggattaagagattaaagtaaagataggtataagaaattataaaagtattatttgggaattgttaaatgtttatattaaaatgaaatttttataatttatgtttttttgtcgtagttttagttagttttttattcggggtttttgattttttataataatagtaagagtaagtaagtaaatttttatttttttcggttttagaggaaaagataaaaaaaaattaagtatttattttatgtttttaagtttgttaaatataggtttttattagttgtttattgtttagatatggagtggttttatttttaatttagaagttaggattttttaggtttttgagggggttatataaaaattaataagtgttagagattttttttttagaaatatttttatatataagaaaatataaatattaatataaaatattagtgtgtaattagattttttgagattttataaaatttgggtgttttaattttagtaagagataatgttaagggaagatgtgtgaataattattttattattatattatgttattttaataatttggagtatgaattgggatagataaaaatttgatgtaataatttatttttaagggaatgggtggaaagatgttatttattagttatcggttgatttagatattttgaatttttattagatattaaataaattttttgttttggagtattgttttaataattaaaatttattattttttttttattttttatattttagtatttgaatttttttattacgttagaattttatattgttaatgaaaagaggtaaattttataaaatatttgaagagatttattttgagttaaatacgagtgattatagtttatgatacgttttttaggagattttgagagtatgtgtttaatgtggttggggtatgggttggttttatatattttaggaagatatgagatattaataatatatatttaagatatatattggtttagtttagaaaagtagaataatttgaagtaagcgagggttgggggttattgtttttaggttataggtagattttaaaatgttttgattggtaattggttgagttattattaataaaaaggaatgtttgggttatgataagaggttgtggagtttaaaattttattatgtagttgaagtttttaggtgttaggttttagagagaatagattataatgtttttgattagatttaaggtttgtgttgatgttaattgttggttagttttttttgaattttaaaaggtaagaggttataatgaggtatgtttaatatttgttttttatggtggtttgagttagttttttaagttaatttttgagcgttttggttgaggagggtgtttattaagatggttgggagagggtgggtttgaagtttattttcggtttataatatgtaatgtgttaagaggagatagaaattatttttatttttagaagagtataatattttagttatttttgtagttgataatggatatgagttttaaattttattagttagatgattatttgttgaagtagtattgttgttttaggtaaatatttagggtttattgtattttattaagaagattaaggatagtgatatataaggagtgagtttattggtcggtgttatgttgtttgttttttattgaatatatggttggtaaaaagaagggaagatggagttattattgtgaatacgtttagttttagatgttttttttttattggtatagttgttagtatttatttgtgtaagtttttagtttgtttgtttatgtttgaagtttgattttataggttggtttttgttagaaaagaaaacgatttggggtttgttttttattaaaaagaaaattttattgagatttttgtatttttattatttgtttaaataatttttttttaaattttatattattgttagattttgagttagaatgaggtgatatagaaaggttgggattgtgtagaatgtattttagtaaatatggttgagtgttagtagtgatgtttagttgttaggggtagtagtgatatttattttagttttggggtttagtgtttagtattaggatgttagaggtgtgagtagtggtgtttgtgtttagtagtaggggtagttgtttttaggagggatttgatttaggggcgtgggttatggatttttttttgggatgtgtagtttttagtttggttttgtggttttttttataataaaattaatttttaatattaggtatattattttatgtataaattatagaaatttgttttttatagttttttttaagaagtgagtgagaaatgaatttatggattagggttagagagtagtattcggaggtgttttttgtgtgatagttatattttgaattgtttatttggtttttattttatggtggagagattaatagggattattatattttttaattgatgatatatatttttttttttttttttgtaagaaaaatttttttttaaatagggtttgaaaatttatttatttattttgggtattttttgatttttgaggtttttgatttggttgagtaataagatttttggtggaggtttagaaaatatttaggttattttttagaatttttgttttataatattatgtataagattaaggaattatttatataataagttttataggcgaggtcgatgtagacgtggggttttggtgttttggttattttaagtgtgatttggagattagtaacgtgagttttagttttgttataaatttagaattttttgttcgattttagattttttggattttagtattatatttaggtgattttggtgtatacgggagttttttgtttaagcgttttttagatatggggttagaattgtgtagtttgttttgtggtttgattagattttttagaattggaggtttagggtttagtttttgcgttgatttttttttatagttaattatttttttggtgttttatttatgtttgaggttttaagtatcgtttatgtggtgtgagtttttaaatttatttttttagtttagtttttttttttgaattgtggagttgtttgtttagttgttattttagtttttttatttgtatttttagtagatattttttttattgagtgtttgtgatgttttttttttaggatgtttttgttagagtttttttatttttattgatagtagttttatttttttttttatttatttattttataattatgggtgtttttgattcgttttttttatattatagatataatttattggtaaatgttgtgagtttatttttaaatgtatttagaatttttttacgttttattattttttgtgtttatattttagttaaggtaatcgatatttttagtttggaatattgtattcgatttttattgtttttttttttgttttttttatttttcgttttttaattttgtttttagtatagttattagagatttttttaagaaagaagttatattatggtttttttttgtttaaaattgttttttaattttttattttatttagagcgaggttagacgtaattttattttttttaagtttatttgttttggttatatttttgattttatttagtttttttgtttagtttttttggtttttttgtttttttgggaatatagatatttttttgttttagtatatttggattggagtttttttgtttagaaagaatttttttagatatttttatgttttttaaatttttttttaaaggttatttttgtaataaggtatatattgataatttttgtttaatagttattttttttgtttttattgtttatattcggattatttgttttatggtatttattattttttattattttttttttttattgtggttatagtgtatgtatcgtttgttttttattattgaagtatatgtttagatatttttttgattttattttaatggtgttttttagatgtagaatttttttgttttgtgtttggttgataataaaggttagttgaatgattagtgtagagtattttttattttaaagttagtatttttattaatatagttttaggttaagtgttgttttgtggtagttgtagtataaggtttttttatattgatatcgaggtcgtttgtattttttttagtagggttgtttgtgtgtttttttttttttatttttttttttatattaatcgtttcgtatattgtagtatacgattaggtttttttttttaggaaggaataattttagattatggatttaattttataaataaatataaatttaaattaggttttgttttagatttatgagttgggattggagttagtacgaagattattggaattagggaagggagagagggtaggagattaaagtagaagaggagttttagaaggagggtaggagttgaatgggtttgaaaatttgttttagaaagtatagggattttcgtgtgtaggggttgttttgggcgatgggtgagtttttgtggttatagttttcgttggataagtttttattgaagggataaggataatggagtagtgaaggtgatttagttgaggattgattatataaagtttatgaagaattgaatagtaattaggtataggtttcgtttatattcggttttttatagttttttttatttttatttgtaatagatttagtatagcgaatatgtaaattttggaaggtttttaggtttttatttgtttttttaatttttaggaattgatttatttaattaatttattaacgttttatagtaaatatttgagaatataaatttatatttaggtttttaattttattagggaagtaagaagttgtagtttagtgtattatgaatttgagatagagatggagatatttagttttatttttttggaataggaaagatgatcggggagggaatataggttagtgtggggataggggttacggtggatacgggggtgggttgtttttttatttttttatattatgttaataggaacgtagatatatttagacgtttttgtagaaagagatgttagaggtttttgaagttataaaggagaggtgtgaagaaattttgtattttagttttatataggtagttgttttaggttatagaatataatagttatgaataaatttaggttagttatggtaagtgatgatattttgaacggtttattatatattcgaaacgttttaattaaagaatttttattatttaggttttttttttttgttttattttcgattattttagttttttagaattttatttttataagtgatgagagatttattagagttttgggtattgttgttgtttggggtagaataaaaaaaaagatttggttagagttcgtaggagatgtgggataagaggaattatggagtaggtgagtttttttatacgttcgtcgttattatttatacgtagtttgagagtagttttttttttttttatttgtgggaagaaaatgttttatgaggggattgggaggaggtagggttatgtgattttaggggaattttttagttttggatttaagagaagtttttagaattacgattgtagatttagggtaggattaggaaatatggggaaagtagttgtgggttttggattaattgtttttttaaggtttgtttttagtagggatttttttttgatttatgaatgttggaattaggattttaatattataattattaaggtgatatattcgttttttattgttatatgtgttttataaaagagtaagtgttggtatatagggttttaggttgggatggtttatgtgtggatggtgtttttagtaataaggcggggtatatttttatttggggtttgaaatttttagtgggataagaaaatttagatttcgttttttattttttttttatttgagtttttttttttatatattatagcggtgattatagttttaaggatagttaggataattaggatagttaggttagtaacgatgtttatgatggggatggtgggttgggaagatggttttgggaaaggaggagaaggtgaggggttttgatttttaagttttagttttgattcggttgaagggttttagaaggatttttgttttttttgataagagatgtgattttttatttttttttttattttagtttagggtgaggggtttttgtagtttttcgtgttgtatatggtacgtgtatttttgtttttgtttagaaggtattattatagttgtttatttttggaaggttttattttttgttggtttggtttttataagttcggtgttttgggtttggttttttttatttcgttgttaggttagtgtgattttcgtagggtagaagtttagggtttagtattttagggtggttttatggttagagagggggtggtgggttacgtgtgtttttgggggttttgacgggaagagttagaaaatttagatattttgtattttttttgggatattttagtagcgtttatgtgattattttgagaatggataggatatttggggtggggaaggcggtatagaatttagacgttagtttggatataggtatttgggataattttttatttattggaaagttttagtttttgagggaggaatagcgatttttggttttgatttgagtggaggttgtaggatttagaaaagttggaattaaatttttagatatattgagtgtgaggtagagaataaggtttgagagaaaggttagtagtttgattatagttgttgtagtggttaaagtggttaaaggagatttttgattagtattttagggattgtttttttttttatttttttagagattttattttttaattgttttagagagtagagggggtttttagaggaaatttaggaaaatttatgttattttttatttaagggagggcgatattttagtgttgattttatttttttttttttttcgtgggaggttatttcgggagatttataggagatggggaaggttttttattgtttttggtatttgcgcgttgtagcgtttttttttcgttttttaggtatttgcggagttattttacgtacgtgttttttaggtaggtttttagttgtttcgtcgtacgggtcgtttttaatttgcgttgggtgatttgagtcgcggtgttcgcggcggtttaggagcgtaggttttcgtttagggcgatgtaatttttgtcgtcgtaggcggattggttatattcgcggaggaggcgttcgtcgggttttaggtcgtagttatatattttttggagggtgtgagattttggtttcgttttcgcggttagtttagtttttcgagtttcgtttcgtttcgattaattcgcggggattttggtttaaatcgaaaatgaaatcgggtaaaggcgattggggtttttttcggtcgagggtttgggcgggtttcgtagatttattttggggtggattttagacggggagattcggggcgattcgggtcgttcgtgggggatggggaggggtcgtgatttgcgtttcgggtcggggttatttatcgttttcgttttggttgtagtagtcgcgtaggtttcgtaggtttattcggttagtttgtgtttggcgtttgtagttttgtgtttttcggttttaatatttcggttttttttgttttatttacggcgttcgcggtttttttttcggattcgcggcgtcgttgtcgaatcgtacgaattgcgtgtcgtttacgtagtttattgagatgaagcggggtttttcgcggtcgggtcgggatacggcggtgtcgaaatattttatggagtgggagtttgggggcgaggaggggttgagattcgttcgatttatttttttgcgcggtttttcgggttttgcgttttcgtcgggcgggtttttcgttttttttcgtagaggtcgttttttttttaatttcgtatttataggtttaggtttcggttagggttaggtttttcgagagtagtaggaggagggttcggggcgttatgattcgtatttcggtttttggggagaatgtgagttcgggtgggtgattggggattttagaatcgggattgcggagacgttgattggtttttttagaattcgatatttaatgggagtgggaattggggacgcgttatgagtatttaggaagaaggattcgacgtaggttgggagaagtgaaatttaggggagtggagaatttttaacgcggcgtttttttaatgtagatacggtttttggagtttgagattttgagagtttcgttcgggatttgggatttcgttttgatttttttttttttatattaagtatttttgttatattgtgtgtttgagttttggataaggatttgtttgtggaaattagggagagattttaaggttgcgtttagtttttttttttttatttttttttttggaattttcgtttttgaattggattttttgttttttattttttgttttattttattttattttaggtaatattaaattatatttagtaaaataaaggatatttatttttttttttggatttttgtatagggaaatttattatggggaatttgatgttagatagtgagttcgttttgggaatggacgtgtagagttaggagttttttttttaaatttggtgaagttttgtttgaaagtattaggtagagatttttatagagattagttttttttttgtttattgatatagtaggtagtataatattggtaatttttgaatgattagaattttaatttgtgaaagatttgtgttaaaattgtattataattaaatttttaaagtttttgttttattttcgtagattatggatttgtgattttgggttgttgtatttaaagttatttttattttttagttagagtttttttgtgtgagtttagaatattttttgaatataaagaagtagggtttgttattgtttattgtaatcgggagtttgtagttattattttaaagttgcgagggttttatgtagttttaatgttttttattagcgttttagtattgttcgttttcgtgaattatgtatatttaagtagtgtgtatattttatttggatatttgatatttttgtaatttttttttaaaaaaaaattataaggagtttattagttttaaggtagttatataaaatgtattaaatatcgaatgtaaagaattttttgttaggtttttttattgttttagaatttttttttttgttttttttttttattttttgtttttttagtttttttttttgttttttttattttttatatttttttttttttttagttttcgttattttgttatttttgaattgtggtattaatattgttttttattttttgtttatgtttgttttttttatagtgtttagtagttttgttaatgtgatttaggtcgtgttatttttttatttataatggttggattttggtttattattttgttatacgtttttaatttgtttcgtatttttttgtttttgttttttttttgttatttttttatgtgttaagtaaatattttttagtttatggttttaatttttttagtggtttttagttatatttttttatattaattttttattgttgtaagaattgaaatttaattttttgattttttatagtgaaatttaggtaatattaagttgtatttagtaaaataaaggatattttaaatggtgtagttttatttaaattattattatgttattattattgtatatgttatattaatatacgttataaatttaacgatatagtgtaatattttttgttttagataagtagttacgtatttttaggaaattaagaaaatgagtgtgtatgtgatatgtgtatgtgtattatttttgttgttaattgtttttttttgtatatttgggttattatttagtattatttttttttagtttgtagaacgttttttaaaattatatgtagtataggatttttaggaaatgaattttatgggtttgatgatttaataatgtttttatttttgtttttttttttttttttttttttttttttttttttttttttttttttttttttttttgtttattagggcgtttacgtgtaaaaaaatttattagttttagttgtattttttggtggatattggtaattatttatagtgtaattattatattgtttagtagagaaatattaaatgtaaagatttttttattaggtttttttattgttttagagtttttttttttgttttttgtttttattttttgtttttttagtttttttttttgttttttattttttagatttttttttttttttattttttttttttagttatttttgagttgtggcgttgtagagaatagttttttttttttaaaaattttttttatttttttttttatttaatttttgttttttatttttattttttttttttatttaattattgttgtgttttttgttattgtaatagtgatatttttagaattttatggatatgtaattatatgttatgtagttttttgtttggttttttttttagtataacgatgtttgagatgatgttatttatttatttttgttgttgagtagttgtcgagtattgttggaattttagtttatttattggtttttgtgtttttagttgatagatatgtggatttttttagttagggtttgttattaatgaagttattataaataattgtttataagtgtggatttatatttttattttttttggataaatacgtatttgtggaattgttgggttatgtggtaatagatgggtaattgtataagaaattgttatatcgttttataaattggttgttatattttttgtatttttattagtaatattagatatttttattttttttatatttttgttagtgttaagatttattatatgtttttttaattttatttgttttaggtgatgtgtgatggttttttattgtggttttaatttgtatttttttgatgattagtattgtttgttatttttttatgtttatttaagcgatttattatatatattttatgaattattttgtaaatttaatgattaattttagagatttttttagaattttttagtgttttttatatatataatgaagttggtgataaagaaagatttttattttttttttttttatttattgatttttttttttttaaaattattattatttggtagagatgaggttttatttattaggttggttttaaatttttgattttaagtgatttttttattttagttttttaaaatgtagggattataggtatgagttattatgtttggtttttgttgtattggttaggatgattgttaggtgtttaaataagaatgatgagagtttatatgtttgtttataaggaatttaaataaatttataagaaaaaaatttatttttattaaaaagtgggtaaaggatataaatagatattttttagaggaagatatttacgtggttaagaaatatatgaaaaaaagtttatatacgtatatgaaacgtgattgtttataattttatttaaaaaagaattgattttaagtaatagtagtattatttttatttaatatttggatttgtaaatattaaaaaagttattggagaaattgaacgattttttgaaagttttaaattaagatatgaagaagttgaaatttggaaaaaatttgaggaaaaggataagtagggggaagtatagtggttataataaaaaaggtaggaaataggaagagaggatggtagtacgttggttaaaggttttttggagattgtattggattttaaagataaaatttaaaagagtaatggtgaaaagaatgaaaaatgtgagattaaagagaaaggagtaattatagtaaaggaattatatataatgatgatggataaaaatattagtttgattataatggatgtttaaagaatgtaggattattaggatttttgtattttatatttttttagtgtttttgaagaagttattagtttagtagttattgttagttggattgaagtatattttttagataattttatagatatatggaagaagagggggaatgtggagtatatggtattttttgattggtttagttttgtaaaagatttatagattagaataattttttggtatttgaaagatgtattttttaagtgggaaagtaagattgttttgtgtaatgggttttgggttttggttttagagggaggttataaaaattggtttttttgttatttttagtatataataaatgttaaggttattttatttttataatattagaatgaagagttgtttattttattggattttatttattttttattggaagaattaattttttttaaatttgttgtcgagatgttatttttatttatagaagtggatgaagatatagaattgataagtgattaaataagtgataatgattaaaatgagaggataggattattgaatatattaattttagttgaattagttgttgtttttaaatttgatgttttatttattatttagttagtgtttagtataaagaatgttttatagattgattatattaaaaaattggtagttaaattgtttgaagagtatataattaaatttgaaagtataaattatgagtaatagtttttttagaatgaaaaagttatttttgattgtttcgttaagttagtagttttttttttaatttttatgttaatagatgaagaaaaggtttatatttatgtagaaattgtttttttaatggagaaaaataaataagaaaaagaattttaggaaagatagtaagggaaatagaaagaaattgaggagggaagaatacgagtaaaaagttaaaaagaaataagaagttgaagaaaatgaaattatatagaagtaataaaaagtaaaagaagaaatggagaagaaagaacgtgaataggttaagaaagtggataaagaaattttagtaaagaagggtaaagaaataataagagtaaaaagataaagtaaaagtgattatgaaatttttggtgtcgagaagtttgtagaggatagggggagaagatgtttaattttagaagtatagaaaaagttaataagagatgtgttttatatatttgcgataggggatttaggtttaggtaagttttttaagattaaaggataattagaaattggaattttaaggatagaaatttttagagaggatatagatgatattgaaagaaataaaatttaacgagaattttcgataatagtacgaagtgaagaaatggggaggatggtattaggattgtttttaggttgggttaagttttttgatttaattattggaacgttttattattattatttattattaatattgtttatatgtatttattggaaatggtttttttatttgtatttttttttatttttttaatttataaaggtaagttatagatttttgttaagtaggatagggaattttttaaattgaaatgtttttatttttttttagatataatttaggttatttaagaggaagttagtagtaattttaatagttaattaggaagataagttaatatgttattttaaagttgagattttaaggttttttgttttttagatttggaaatttaattttgtttttggaggttttggattagtttttattggatttcgtaatttaggaaatatttgttatatgaatttaatattgtagtgtttatgtaatgttttatatttggttgattattttaatcgaaattgttattagatgatattaataagttaaatttgttaggggtataaaggtgaagtggtagaagaatttggtataattatgaaagtttcgtggataggatagtatagatatattagtttaaaagattttaaagttattattgggaagattaattattagtttgtaggatatagttaagatttataagaattttttttgtttttaatggatggttttcgtgaagatttaaataaaattgataatcggaagatatataaagaagaaaataatgattattttaatgattttaaagttgtagaatatgtttggtagaaatataagcggttttatgagtttattattgttgtatttttttagggttaatttaaatttatagtatagtgttttattcgttataaaaagtttaggatatttgaggtttttatgtatttgtttttattgatagtatttataagtaaatgtatattataggattgttttagattattttttaaagaagaaaaatttatagataataatagattttattgtaatttttgtagagttcgacgggatttttaaaaaagaaatttggaagttattatttgtgtttttagtgtatttgaaatattttttttataatggtaggtggaaataaaaattatagatatttgtggatttttcgttagaaaattttgttttgttatagtatgttattggtttaaagaataatttgaagaattataatttgttttttgttttagattattgcggtgggttggatggaggttattatatagtttattgtaaaaatgtagtaaaatagcggtggtttaagtttgatgattatgaagtttttgatatttttgttttttttgtgaaatttttagtagtttatatttttttttatatttttttgggattatgagtaattgatgtaggtatataaggagatataggttataaattagttattttttaaaaggtttagtaatataatttttgaaatgtttattaagataatggtagtaatagttggttatttagaggaattttaggatagtgggagttgtgttattagtattatataatttttgttagtggtgataaataatatttaataagtattgtagtaagtattatttataggtattatttattttaaaataatttttttagtttgttttaaagttaaaataattaattagttaagtattattattttattggtttaaaaatttttgtatttttttttttttttttattgttatagtttttttatatttttaaattttatttttatatattatgaatattttagaatgatgtgaagtagataggaatgtatgtgtatatatttattgtatatttatatattaaatcgatatatatagtttaatatgtggttttttcgtgaaatttagaatttagaggattgtatttttttttttgagtatattttgagtaattgtagtgtttttttagggaaatgatagggtaaagttatttttttgttggttttgggggtatttgggtgcgttaaatttttattttaaaaaataaatggaaattttttttaattttttaaaatgagatattaaaattttaatgagaaaaattaaaaaagtttaatattattgtttattagagaaatgtaaattaaagttataatgagatattatttttcgttagttagaatggtaattattaaaaagttaagaaataatagatgttggtgaggttgtggagaaataggaatatttttatattgttgttgggaatgtaaattagtttaattattgtggaaaatagtgtggttattttttagagatttagaattagaaatattatttgattttttgggtatttatttaaaggaatataaattattttattataaagatatatgtatacgtatgtttattgtagtattatttataatagtaaagatttggaattaatttaaatgtttattagtgatagatggataaagaaaatgtggtgtatattattatggaatagtatatagttagaaaaaggaatgagtttatgttttttgtagggatatggatgaagttggaagttattatttttagtaaattaatacgggaatagaaaataaagtattttatgtttttatttttaagtgagagttgaataatgataatatatggatatagggaggggaataatatatattagggttttttggggagtgtggggggtaagggacgggaatttagaggatgggttaataggtgtagtaaattattatggtagattatacgtatgtaataaatttgtaggttttgtatatgtattttggaatttaaagtaaaataaaataaagtaaattaaaaaaagaaagtttatgttttatatgtatgtatatgtttattgtagtattatttataatagtaaagatatggaattaatttaaatgtttattaatggtagattggataaagaaaatgtggtaaatatgttttatcggtaggatttgatggcgtgatgttttatagaaagttttttatttttagatatgggtttttcggttttttgttttggaagcgtagtagtaggtattgtgggaaggtgaagagtttttttaaggatgattcgtttaagtcggtttattttatagtttttttgggatataaggttggtatgatttatatcgtgcgggaagtcgataggttaggatttaaggtgaataagaaggaggtggtggaggttgtgattattgtggagaggttattagtgggtattgtgggttgcgtggaaattttttaaggttttcggatttgtaagattgttttcgttgagtatattagtgatgaatgtaagagacgtttttataagaattggtataaatttaagaagaaggtttttattaagtattgtaagaaatggtaggatgaggatggtaagaagtagttggagaaggattttagtagtatgaagaagtattgttaagttatttgcgttattgtttatatttagatgtaattgttttttttgtgttagaagaaggtttatttgatggagatttaggtgaatggaggtattgtggttgagaagttggattgggttggcgagaggtttaagtattaggtatttgtgaattaagtgtttgggtaggatgagatgatcgacgttattagggtgattaagggtaaaggttataaaagggttattagtcgttggtatattaagaagttgtttcgtaagatttattaaggtttgtgtaaggtggtttgtattggggtatggtattttgttcgtgtgggtttttttgtggtacgtggtgggtagaaaggttattattatcgtattgagattaataagaagatttataggattggttagggttattttattaaggatggtaagttgattaagaataatgtttttattgattatgatttgtttgataagagtattaattttttgggtggtttcgtttattatggtgaagtgattaatgattttgttatgttgaaaggttgtgtggtgggaattaagaagtgggtgtttatttttcgtaagtttttgttggtgtagataaagtagcgggttttggagaagattgattttaagtttattgatattttttttaagtttggttatggttatttttagattatggaggagaagaaagtatttatgggattatttaagaaagatcgaattgtaaaggaagaaggagtttaatgttgggaatagatattgtaattggtgggattttaataaaagttattttttattaaaaaaaaaaagaaaaagaaaatgtggtatatatatattatagaatattatgtagttataaaaaagaatgagattatgttttttgtaggaatatggatggagttggaggttattatttttagtaaattaaggtaggaatagaaaattaattattatatgtttttatttataagtaggagttatatgatgagaatatatggatacgtagaagggaataatatatattggggtttatttgagggtggagggtgggaggagggagaggattaggaaaaatagttaatgggtattaaggtttaatatttgggtgggtattaatgggtatagaaataatttgtataataaaatcgtatgatataagtttatttatataataaatttgtatatgtattttttaattaaaaataaaagttaaattaaaaaaaaaagaaataaagaaattgtatatttggaaagagtatatggttgggttttgtgttttgttttttttttttaattaatttatataatttttgttttttattggagtgttgatttatataggttttttttttattattgataagttttaggtttattatgttatttttttagttttggtttttttgttttttttgttttgattaacgattttttattagaaattatagaaataaaagaaagtagaataatatttttaaagtgttggaagaaaaaaaggataattaagaattttatatttagtatagatgttttttaaggataggtaaaataaggagatgttttaggtaaaagaaaattaagagaatttgttattagtagatttgtataataataattggtaaagaaaattttttaggttaaaggtaaatgatattaggtgggaaatgaggttattagaaaagatgaagatgattaaaaatggtaaatattgagttaagtgtaaaaggttattttgttttttttatttattttaatttatatatatagaattgtttaaagataagaagaagttttttttttgtgggatttataatttatatagatatattatatataatatttgtattataaagatggatattttatagaggataaatggttgtaagatttttttatttatgggtattagtatatttttaattgaaagtggattgtgaaatgttaagaagagttaaattttgaaggaaattgagatataaaaattatttaaaagattaataaattttatgatggttttttgaaaaaaataaaataaaataaaataaaaattaaataaaaataaaattttagttagttttgagttttattattttacgattttagaattattgtgaatataaaagtaattaaagaatagttttgtttagaaagaggagttatttttaaatatggtgtttttggaataggtggttttttttgttggattttttttacgtgggtgttttttgtagtgattttgttgttttgttattttattttatttagtgtttttatttaagagataaggggtgtttgttgttgtatttatatttggagaaagaaattttgatagtgttagtatattataagttgggtatgatagtttacgtttgtaattttagtaatttaggatgttaaggtaagaggattgtttgagattaggaattggagattagtttggataatatagtgggattttcgtttttaaaaaaaataaaaattagtaaacggttgggtttggtggtgggcgtttgtatttttaggtattgtggaggttgaggtgggaagattttttgagtttataaatataaggttgtattgagttacgattttattattgggttttagtttaggttagagtgaggttttgatttaaaaaaatatattgtaagtttttgtttattatgggttatttattatttatttaatgtgtattttgattttattttattggtagtataataaattaggatatgttgaaattagaaattatatttattttttagtgttaaaaagtttagtttagggaggtgagaaggagatagtttttattagcgttgaggatttagggagatcgagatgggttgggtaggaaggtttttatttggaatttggaggatgagtaatgatatttttttttttattttaaagtttattttgggtatttgttttttgggagtaggagtattgtaagtttcgtttttcgggtttacgttattttggtttagtttttcgagtagttgggataataggtgtttattattacgttcggttaatgttttgtattttttagtagagacggggttttattatgttagttaggatggttttaattttttgatttcgtgatttgtttatttcgattttttaaagttttgggattataggcgtgagttatcgtattcggtttttttttgggatttttttattggatattagtttgagttaatttttttgtaaagtaaaagaagcgtgaggttgttaaaggaggaatggtgtgatttttatttttggcgagatttttgttatcgtgtttaggcgaagggttaggttttattttttatgtagagaggaggttatggttatgaagacgtttgtggagaagtgaggattcgttttttttatattgatggttaagagtttatagatggcggagaaggtttttttttagttgtgttttattaggtttttttaggagttaaggagtagatttgtatgttatttttggtgatgtaagttgtatgtatatttagaagtgaggttatttttgttgggggttttggggttgttggttgttttgggtgtttagtgtttagaaaagaagatggggaggaggttttgtgtaaaatagtaattatattttataaattatttttttattagtttttgtgttataaaataaaatataggattttaaaagaaaaaaatgtttaaaatttgtgttttttaatataaagtaaatatttattaattattagggatagatgtttgtggggtaaattagaagttttattatttgttttagtttagtaataaattttttttttttttaaataaaaatataatttgatttttacgattattaattttttgttttatttttatttttattatttaatattatgatttagttttatttttagaaatatgtttttgttttttttattttatagatttttttttgaaatttatattgtgtggtagagttttttatagtgtgtattttgttgattgttttttaaggtatagtttaatatgtatttttattatttgtattgtttttaaattggtaattggttatggagattagtttttatttaggtttggttttttttttatttggatttgtttgatggtgttgtattgtgtttttttattaagaggaagaattttatattagtttttttttttattgtgttgttaattgttattgttatttaatggttaaatttgttaatttatgatgggttgtaaaagagttattatagttttagttttttattttttttttatttattatttgaataatttttaagtaagagatttatttttttttattgtttgtttattattagaaatttggtttttgagagattaagttaattatttatttatttatgatttagtaatagtatttttagttttaaattaatagaaatgtatgtatgtgtgtgttaaattatatgaaaatattatttatagtagtacgatttgtaaaatttgtatataataaaattgtttattaatagtgaaaggataagaaatgtgagttatttataaagtggagtattggatagttatgggagtgaataggttacgattatatatagcgagatgatgagatttagggttatgatggtgattgtataatgttatttaattagatttggtagaatttatttgtattagaaattaagagtggttattttagggtggggagggtggtttatgattgagtaggatttaaagatgttcgtaaagtaggtttttatattaaaaaaaaaaagagagagaaaaattaaatagagaaatttaaaagtttataaataatgtttatttgtatttaagaaaattatagcgatagtcgttagataatgattagttttaaaaagagaagtttaagaagtttatgttatagtagttggtatagttgaggagattagataaattagtataagtatggttatgaaagggagttgtagatatatggtttttagagttttaaaatttatatgattaaaatttatgtgatgcgtattatatgatgattgttttaagatagataggtgtttatttagagatatagagttgtgatttgtaggggttggttgatttttttagaatttattaatttaaatttattagttattattttgtttttatttttattattattttagataattttgcgtttagtttaagatttttttttttatcgtaattgaaagttattaatgattgtaattaatttgaaatattataagtaggtaagatttttttagtaagtaaatggttttagtatatttttgaagttataattataattaaagtttgggatatttatttgttttaaataagtagttattttttatttagaattatataatagaagtttttatttttgtattttttaatagtttgttttagttaggaaaataaattttatgggtttttagtatgattatagtgtaagaataaggggaagggtagaggtgagaattaagtgtttttttatagttacgggtttattaaggtaattttgagaggtatttattaatatgtgatgtgttagtaataatatgagggaagataattacgtgtttttaggataaggtaaaggttttgtttatggatttattcgtaatttgaatatagtatatgaagagtgaatagttgttaatatttatttttattttaatgtaaatttttaaaattaagattaagtggagtacggtgttttttgaagtattgtttgttatatattaaggagttaagaatttttgtggttttttttagaatatagtttttttaggatatataatgagtaggtttgttttagtatttagggtttatatgtagttgttttgtttagagttgtttagtttttggattatttatttttgtttttgttggttggtgtttaagttgtaagggttggtaaatattttgagtattggttttaaaggtttttgaaggtgaaaggattttgttttttatttttattatttttaagtattgagattttttataagaattatttataagtatttattaagtgaatgtttataggaaattttttttgaaaagggtttttttaattttatatttgataagtgtgtattaaggtaataaaattatttaattgagtatttaaatttatatagaggatattacgttaagaaaatgaaagtagaaatattggattttttttatttgttaaatttttttttttagaattaatagttttttaaatttataaaatattttaaaatagtaaaataatattaattatttatttgaagatatttatttgaaatatagttattaatttttaaaggtttagtattaggtagttttatatagtatatttgtagaattgtaatgattaataagagtaaatttaaagtatattaaatatttttatggtttataggaaaaaaaaaaaacgttttttttaggacgatgtaatagttatattttatttttttatgtgtagtatgatattttatgtttaatggtatttaaatgttatatagtaaatattgagaaaatttagaatttttggatgtgtagaagtaatattatattattaatataaaaggtgtttagttgcgggattataatattattgagtgttgagattatttgaaattttaagtatatttttagtatatggttttttggttgttatttagtttggtattagttatttatttgttgtatagagttagttttagtattgttttggttgggtcggttgtttttgttaaattttaagttttttttagaatttttgtatttttttattgtaatgtattgatagggttgtgattttgttttttttaaggggtttatttttggttttttgtttatatagattttgtattttttttagttaaatttttattttagtagtagtaaggagattatttttcgtattattttttggtggttgtgtaggtttttgatattttgttttagttattggtggtagtgtgggggcgaatgtatggggaagataaaaaagaagaattgagttaagaggtttggtggggaaagtgtgtggttggaggagggaatgttggatttaggggttagtggagggagggtgaggaggagggtgtgtggagttagttgatatgaggaaggaggcggtaggaggatttgtagaaggtaataaaggtagtttgtattgtaaaagggggaagagaaggaggttttgacgggttgtaatatgtaagtatttgtgttgggagtattttgtagttttttggagttataagtgtataggattggaatatagttggggtaaggtagggaagtgggggtcgtttttgaggtttatttagggttatgtgttttattgaggtagaggaggggtggtatttaagtttaggggtttggtttgtgggtttatgtggatatgtatttttagttgtttaggaagggtcgtgagaatggtttggagtagttcgataagagtatttttaatatttattgtatgggatttgttgtttagggataggggtttttgtaggatgttttatggtgtatattgagataatttgttgttgggtttaagttttttgttatatgttattatattttatttatggtgtttgtttttggtttttgtaattttttttatattataagtggtgttatttatgtggttttgttatttttgatgttttttgtttttttttttgttttttgtgttttgtagtattttttttttttagaggttaaataaatgggaaggattagtatagaattttagtttgtttttattatttttatgtgtttttatgttatttaggggaggtggttaattattttgattgtaaatgttagtagtaggagtaggaatgttgttttttgaaattgtttgttggttttgggttggggaatttttgagggttttttttatgttgatgttttgtggtgatattttttttattgttgaatttagttgagtgattttgattatgaggtaataaattttaagagaatttgatttaatgtggaagtagttagtttttttaaatagtttattaaatatgtttttagtatgtatgtttagattgtttagttggtgcgtaatagtgataagattgttgttggttatatttttaagttattggtaatttttttaggtagagttttttggtgtaaatgttgggattagatgtttttttttacgggaggtatggtttataatgttttaattgattaatggttttagaaatttttttaggaagtattattattttgatttagatattagtagtaattgtaattaaaattaaaatgattagtttcgttgatgtagaggtagagattgtattggtagttttttgattttattttatattagaatatatatttttggggttagttaagttgttttaggttaggttaaggttttggttattttatttgtaattttttttgtagttattttgtttttatttattgaatattttagatatgagttaaaattttttattaaatgtgggaaatttttaattattatttttttaaatatttttttttgattttgtgtttttttttgaggatttatttgtatatttggttatttgttttatattttttgatgggtttatgacgttttttttatttttttttttaattttattttaatttgtgttttggattttagaattgagtatattttggagatttatatttaaagttataggtttgttttttattttgttattttaaaatttttgtggattttttttagaatatttttatttttttttttttttgtttgagaatttttatttagtattttacgtggttttagtaggggtttttgggtgtgtgttttgtatttgtgtaatttagaggttgattaagtatttgggttatttatatttagattttgtgatttaattttattgtggttgttttgtttttggaattttttttgaatttttaattgttttgttagatttaaattttgtttttttattttttaagttagtaagatttttgtttttttttattgagttttgtgtaggttggtaaatgtatttagtttatgttattgaagatttgtagattttattaggattatttatttttttggagggtagatttttttttagtttttttttggttttttattagatttttaagtggtttatatttatgtagagtttagtgtttaattagggatgagtataatttgtatttatattgttgattttaatttttttgtagtttttttttaatatttttatttatatttttagttgatttgggttttgaattttataaattgtttatattgagttattagggttgtagttatttgttgggaggttgaagagtatttataggtaagaaggaaaggttattaatttgtagtttttatttaagatagaaggagttttaaataagaaagtttttattatatattgtttgtttttgttaattttttagtgattttaaatgtttgtttttagtatttagtatagtttttatgttgttgttggaggaaaatttgttggtttatttttttatgttgttataattagaagttttattttgaaagagatttttgggagagaaggttatagtttataatttaattttttgagataaatatggatttaggtattagaaattgttaagttagatttttaaaattaaaataagattagagttgggtgtagtggtttatgtttgtaatgttataattttgggaggttaaggtgggtggattgtttgagtttaggagtttaagataagtttgggtaatatgataaaaatttatttttataaaaaatataaaaattagttaggtgcggtggtatatagttgtagtttcggttatttggaaggttgaggtgggaggattatttaagtttggggcggtcgaggttgtagtgagttgtgttcgtattattggattttagtttgggtaagagagtgagattattgtttgaaaaaataaagattgaatgaataataaaagaagattaggtttggtatttgtgattttaaggttttatgggaattattgattttatataatttataatgataaagaaggatattttatatatatatgattggtttttttagtattggagagagtatattttatagtttataatttttcgatagtttgtgaattaagttattaaaattgtagttaaagttgaatggaggttatggaagtagtttagtgaagtataaaataagtattgtttttgtttttgattttttttttaaataatgtatttatatgtttttaataaattttatagtcggttgtagttattggtaatgagattttttattattgaggttttggtttttttaatttgaggaattttagtaaatttaaggagtataagttttttgagaaataattgtatgatattattaaattttaatgaggatagatgattttattaatgaaaaagtatgattttatattttgtaagggtatttttttaatttaaaattttatgagttagtataagtatagaaatattttataataaatggaaatgttattttgatttaggtaaaagttaagtatatttgttatttggttttaaatgtttatttggatattgttgagtgtgtgtgtgtgtgtgtgtgtgtgtgtgtgtgtgtgtgtgtttgtgtgtggtagttataggatttattgtttaagttttagggtttggggaaaaagttttattttttttttgaatttgagtaatagtttttggtttattattgggttttggtagattttgaattttatgattatgatatagaaaatgattaagtgatttgagatgtttattatgatttgagttttatcgggttatttatgtttattagtttttagtttgtaaggggaaatggtatatatagtattagattttagtaggttttataaggttaggtaagttgtttaataatttgtattatatttttaatgtttttattattattggagagtttatttttttttgttttattattgaggttttgaggagttttttaaggataattgattgtagaaggaaaaaaatttgagtatgtttggatattttagagttaattgttagggtattagagttttttttaggaattattattaagagtaatggaaataaaaatatttttagtgagaagatgtttaattagattatttggaagtgtagtttattaaaaggagaaacgttttattgttgggttttaattaatgtatagtagtagttagtagtttttttagatagttagtgattttaaaggaataagatggtaaggtttgtgataaggagcgttggggaggagatttgaattatttatatggtatatttaggtaaatatatttatttttatgttaataaaaatggatagtgaaaaaataaaatataatgtagaagtattgagaggtttaaattttaataaaaattgttaaattttaaattacggaattgtgtatttattttttttgttgagtttatttatttaatgtaggataattaaggtttagtttttatggttttttaaggtatttggaatagaagatagagtttaggtagtatttagagtgggaaatttaatagagtgttttttttattttattaggattttaaagttagttttttagtataaggaaaatatttttgtttgaaggtttttttagaaagttattttggtgttgagtggagaggggtaaaatttttttttgagattaaagagaagtggatttgtagttcgagtttatattttttgggtggtttaaaaattattaaggtatgaatttattttaaagtagtgtagattttaaggaattttggaaaattaagtaaaatttttttgaaaaatttttattgttattggtattttgaaaattttaaaaaattattatattagtaaaaggagtatttaatagttaagaataataatagagaataatgtttataagagataaagtatcgtgaaagaataagaaaatataatagatagtagaattatataattatataattgagaaattagaataattgtataggatataaaattgttaaatgggttatgattaaagaatagattgttaaatatatttagtgattataaaattataaataatttttagaaaaatttgaagagataaatatataatatttaagtatgaaaatataataataaaatttaaattttaatgaattttgaagataaataatttaatataaatatatttagtaaagtataagaagttttaaagaatgtattttagttataaaaagatattttaggtagaaagtatgaggtgaaagaaaaaaataaataaaaaataaaggtaaatggatggttaaatataaattgaggtttaaaaggatagtgtatatattgagaatttataaatattgttaaatgaaatataaattattttatttttttttaggtttaatgttggattttttttttttatattttgattaaaattttaagataaattttttatttataatgtgttttattttggttttgttttgtatattttagtataatgtatataaaagaatattttgcgggtttttttatggtatttttttaagttattgttggattgtttagtattttacgttttttaattttgtaagtaatgaatgtataagtttaattgtatatttttattagtgggtagttttttataatatgaatgttatttatgtagttggcgggatttgttagtgtattttttagaattacggatagatttatatgttttgggatgtagggagttagagtgtttttttaattggatgtaatggaatgttagggaggaaagtttaagataaattttagttattacggaattgtgatttttaagtatagtaagtatagtttgaaatattatattttttttaatttttttttgtatttaatacgttattagttttgtattttatatttattgttataaaagaatttgttggggaaggggaggtagttttaggttagttttggtataattatatagtggttaaattagtagatttagtgtaaaatggtttggaattgaattttagttttatatttttaaaattatggaattttgggtaagtaatttaatatttttgtatttaatttttttgaataagttatagtttatagattttatttatttattgtggataataatattttttttatatggttgtgataaatattgaataaaataatttatgtaggtataaaaattagtgtttgaaatatagtaagagttttttaaatgtagttattattgttattatggttatttttattgtcgttttttatagaatattttttggtttttatataggatttttgaggatttgttggattagtagtttttttgtaagattcgttgatattgtgaaaattttttaattatagtttagttataattttatagaagtttttaatattttatttgaaggttttttatagttagattatgagttttggttgaaggtattttttggagttatggtaatatttcgggtattttgggaaaatagtgattttaaaatatagtttgttttgttgagattaggaatttggaaaattttagtttgtgaagtgaagggagaggagatatttttttagtaggaggaagagaatgtattaagtatagggtagttaaagaaatgtttgtttgatttttttgttagtggttatatttgtggttttattagttaaatgttttatgtggtatattttttttaataagtatttttaaaagtttttgaaaggaaggagtttttgttattattatttttttagttaagtgggaataatttggtgagtatagtagatgttaattagtttataaaaagtttaatttttaagtttgtagaattaattttaaaaacgagaagagtattggatatagaatttgatatatatgttgtatgtagaagttgatattttagttttatagtttataggttttttagaatgttttatatttttttattataattgggaagttgttattttaatttttgagtaggattaaggtatgaaaagagtaatgatggtgtgtttaatggttatattattaaatataagaatgtttttagttcgatttatttgagttatatggagatttgataattaaatataaagtgaatggagataaatgttttatttattttttgtagatgatattttttagttagtaagtggtagatttaggattattgggttaggaagttgtttgggttggagtataagggtagttttagggatagagaaattaataggtagagagggaatttttgagattaggaaagattaattgtagttgggtttagatgatttgagatttaaatgtagttgttgattttaaattatgtaaagtagtaatggaattgttagttagttagtatgtttagttagttagatagattaggagtttaattattgacgttatgggaaattagaaaattttgggatggttgggagaatatgtgtatatagatatttgtagagtgggtgataaataaatgaaattatttaaatatttattttaggggagtaggtgtatataatatattatggaatagtattaaaatgatgagttaaattattttttttgtgaaatttaaaggatgtttatgatataatagaaataaaaatattaaatggtagggtattgtgaatataatgtaattttttaaaagttataatgagtaataagatgaaataaaagttatttagattaaaaagtaagaggtaaaattattttaattgtagatgataaaattttatatagaaatacgaaagaatttattaaaaataagtttagtaattattaaattattaatattaaattagtttagtatattggtaggttataagattaaaatataaaaattgagtgtgtttttatagagtattaatgtattaatataaatgttatttaaaaatttaatttataatagtattaaaaataatgaagttagaagaaaattgagggtttagtaatattttttatttatatggttaattggttttataaaatagtgttaatataatttagtgaggggaagaaattatttttttattaaatagtgtagaaataataggttatttttatgtaaaagaataaagttggatttttattttatattatatataaaaattattttagtgtattaaagatttaaatgtgagatttaatattagagaatttttagaagaaaatataagtataaatttttatgattttggattaggtaaaaatatttgattttaaatgatattaaaggtataagtaaaaagaggaaataaaagataaattgaatattattaaaattaaaaatgtgtgagtttaaggatattattaagaaagtgaaaagaaatttattgaatgggagaaaagttttgtaaattttatatttggtaaggaaaggatttgtatttagaatatataaagaatggttgtaatttaatataataatattaataataagataataataaataataaataataataataataagataaataatatataaaaggtttataagtatatagaaatatgtttaatattattaagtattagggaaatgtatattaatttaaaaatgagatattattttttatttattagaatggttataattaaaaagataataattagtgttgatgagaatgtggagatattagaatatttatattttgttggtggggatttaagagatatagtttttttagaaagtaggttagtagtagtttaaatttgtgaatattaagttattatatgatttagtaatttttttttatgatatagtatatttaagagaaatgaaaatatgagtttatataaaaatttatatgttatgtttatagtagtattattaattataatttaaatgagaaggattaaaatgttattaattaataaataaattgtgatatatttatataatggaatgtaatttagcgatgaaaaagatgtgaagtattgatataagttacgatttatataaattttgaaaatgtttcggtaagtaaaagaagatagatataaaaagttatatgttgtataattttattatataaaatgtttagaataggtaaatttgtagagttaaaatataggttggtagttttttagggttggggtttggatatggatttttttgtagggttgggaggagataaaaggatttgtaattgattgtggtaatggaggtataattgtgaatattttaaaagttattgaattgtatattttgaatgtgcggattttatattatttaaattatattttaagttgttttgaaaatgattaaattatatataaaatttatagttattatagtttaataaaagttattagataaaaatatttattatggtttgcgtgtaagtgaagaaagtagatatgtagagagtaggttgatataatagtaattattttagttaagtgggtttggatttagtgaaaggagagatttaaaagtatatttatgtatattttgattgttttattttttattgtgagtaagaattatttttatattaaaatttaaaaaatagaaagttataaatttttaaagttttgtagttaaataaatatagtaataagtgataatgagttgtttggaatgtttttttagagaattggttgaagtatatgtatgtaaaaggaaggtaatggttgaagaattaaggtagaattatagtggtagaagagaagaaaaatgtaaatatggagatataagataagaagatgattgatgaaggaagtggatatgaatattgtgaaaattttttggggagttagaaatgatcgggtttacgtgggagggaaattggattatagtttaagatggttagttattagggatagtgtttcgaattagattttgtttcgaattagaagggttgtttaattatttttttttttttttttttaatattttagtaagattattgtttaatttatagttatgtacgttgaagaattagtataatttggagattttgagataatagatagaaaatttttgagtttttttgggtattagtgagttgtttttagaaaaatagatttattttggtattttaggaataaatagaaataagagtatatattaatgtttggaaattacgggtagtaaatattggtgaagttatgtgataggtagaataatagttttttaaatatgtttgtgttttaatttttggaatttataaaaatgttttttaatagggtaaaaggaaatttttagatgtgattaagttgaggtttttgagatgggaagattattttggattatttgggtaggttcgatgtaattataatagtttttataagtgaaaggagtagaaagtagtattagagttagagttgtgataatagaattagaggttaaagtgatgtgattgttgatttggaagatggaggaagagattataagttaaagaatgtaggtagttttaagaagttggaaagggtgaggaaatagatttttttttagagttttagaagaaatgtagttttgacgatatgttaattttagtttatagtgatatatttttgattttttatttttagaattataagagaatatattggtgttgttttaagttatatagttgtggtaatttgttatagtagtagtaggatattataataatattagttattattggagtttttggaagttgtagtagggaggttagggaagtatatattgaagattttagtttgaagtatggatgggaggtttttagaattttgttgcgagattgttatattttttagaatttatgagaaagtttttattatttattttagtttatataagtaaagtaggtgggtttttagtttagtagggaagttattgagaatttgatatttgtttgtttttttatttgtagttattattgatgggtataggtttgttttattatttttttagggttttattttttaggtaagttttttttattggaaaatgtaaattggaattatatagggaaggggattttgggagatatagtgtttggttttttttttgtagagaagatgttagaggggagatgaggtgatattgggtttttaataatgtaatatatgagttattaatagtgaatgaagggggattggttgattttagtttgataagtaatgtgttattagatgatgtaaattattggtatatttatgagatttagtagttttagtaagttatttattggagtaaggatgtattaaaaattatgaaaagtgtaggtttaaaaaatgtataaaaaatttaatggattatataaatgaaataaattttttttttaattatatttttaagttttgggatatatgtgtagaatgtataggttggttatataggtatatatgtgttattgtggtttgttgtatttattaattcgttatttaggttttaagtttcgtatgtattaggtattttttttaatggtatttttttttttgtttttattttttgatagattttagtatgtgatgtttttttttttgtgtttatatgtttttattgtttaatttttgtttataagtgagaatatgcggtgtttggttttttgtttttgtgttagtttgttaagaatgattgtttttagttttatttatgtttttgtaaagtatatgaatttatttttttttatggttgtataatattttatggtgtatatgtgttatattttttttatttagtttattattgatgggtatttggattggttttaagtttttgttattgtaaatagtgttgtagtgaatatatgtgtgtatgtgtttttatagtagaatgatttataattttttgggtatatgtttagtaatgggataaataaattattaattatgttgttattttatttatttaaaaatgtgagttcgtggtttgagtaatttattttagtatgatttaagaagggtattggaagttcgttgatttggttagaatagaattatatatatgaatggaaaaagtggttttgtgtttgttaattttaggggtttataggatgttgtttagaataggttggttatagtaatttttagttaagttagaagtttggaatgagtttaattttgggggattaaattttaatgagaggtagaaaataggaaagtttatgtttttttatgttaattaatggttttataaatatttttttgtatatatttttgtaattttaaaaaatttaagtgttttattagtaattttttagaggtgtatatagagagagatgagtataattgtgaagttaagttttgtaaagtatagggatggttaagaatgggaaggaattgattttagaattttatagagttaattagtaatttttagtttaagtacgtgatgattattgttgagttttaaaggaaaagcggttatttgaggagtaaatagaattgtatgaagaataagagtgtagacggtgttttaaatatagtgttgagatttatgtagaagtataggaggaagtaattgtgtaagtatttagagttttatgaagtagggattttaattttttaagttatttttttttatttgttaataaggattaaggtttttgtggatgtaattggttgtggttgatgggaatttttgtgatttttatggggttatatatagtttcggagaggggaatgaatatatatatagtaaagggaaattatttgggtttttattgaaattattggttgatttttgggttaaagtatgtatgttttgagtattgatgttaattatatatagatattgtttagattttatgttattttatattgttggaaatttgttttgatttcgatttttattaatgattttatgggtagtttttatgattagttgatttaagaggaaaattttgagtttttttataaatatgttagtttagtgtgttggtgtgaggtagtagtagagtgtgtttgtagtgtgggtaatttaggaatgagtagagatagtgttgaagagggttttgttaataggtaggtggggttttgatttgtttattttgtgtagatagaagtggtttgaggtgagaatatgtatagatttataggtaacggtaaatggtttaaatagcgggttcggggtttggaaggagtaagataggaagattaggaataggaatatttggaaagaggtatatagtagatataaagtgtttggattttttgtattagatgttaatatttagtaaaaattattttttatataagtagtttaaataattaggtgtataggatgaattatttggtatatattagttagtttttgtttttaattattttagtgtttatgaaataggtttttgaaagtagtatttatggtggaagagatgtattgtgggtgggttttaaggtttgggttttttttagtatggttgacgtggttattgttataatttattttttaacgataaataaattttaatagattatttttgtttatggaggttaatgagtaatttgatggtaaattgattttatttttatttttttataatgaaaaaggtaggggttttgttagatttagtttgttttgtattagcggtatgagtttgttttttttttttatagtgttatatttagaaacgttatttaagggtttatatatgtatgattttttaataggggaattatataatattgttttagattaagggatttattttatagcgaacgttgtttggtagtgggtatacgattatgagattttttggttttattttatattgtattatatacgttgttagttgatagagtagtggaatggttttttgagggtgtagttgggttttattttgaagattatattttattaggatgggtaatgttttttaggatgaagtatatatttaggttatggtagtagttgttatatagtgttaagtttttaataggtagagtaagtaagtttttaattattagtgttggaagaaggaatgattatatttattagtattttcggtaattcgcgtggggtgttggtgttttttatttttttaacgtatttagttggtttaggagtttgggattttagagaaggaagtttttattatggaatagagtataagttatattacgtttaggggtatgtttgttatttgtttaatttgggttttttatgttaggaggttgttgggaaaaggaggggttattgtataagtagggataattgatcgtgattattatgaggagtagaattttaatttttgttttaattttttgttgaaattggtaatagtggttgtatttaggtaaggaatttggaagaattgtggatggggtggagaacgaaatttgttttgtatattatatatatttttattattataattttttaaatattgtttttgtattagttatttaaaataaattttaaattataaattaattttatatttatttaaaaaatttttttattttaatagtttttgggggataggtagtttttggttatgtgtgtgagttttttagtagtgaattttgagattttggtgtattattattcgagtagtgtattttgtatttagtgttgttttttattttttattttatttttaatttttattaataagtttttagagtttattatgttattttgtatgtttttgtgtttttatagtttagtttttatttataagtgagaatatttagtatttggtttttttatttttgagttattttatttaggataatggtttttagttttatttaagttgttatataaggtattattttatttttttttatggttgagtagtaatttatggtgtatatatattatattttttttagttattggttggttaatgagtatttaggttggttttatatttttgtaattatgaattgtgttgttataaatatgcgtgtgtatgtgttttttttatataatgatttatttttttttgggtagatatttagtagtgggattgttggattaaatgatagatttagttttagttttttaaggaatttttatattgttttttatagtagttgtattaatttatatttttataattagtagtgtaatttatttatgttaatatttattgttttttgattttttaattaatgttatttttttttttttgagatagaattttattttgttttttaggttggagtgtagtggtatgattttggttttttgtaatttttattttttaggttttagtaatttttttgttttagtttttcgagtagttgggattataggtgtatgttattacgtttagataattttttgtatttttggtagagatagggttttatcgtgttagttaggatggtttcgattttttgatttcgtgatttgtttgttttggttttttaaagtgttgggattatagatttgagttatcgcgtttagttaaattaatgttatttttgtatgtataacgtggtattttatggtgaattttatatttatttagtaaatatttattaggtagttattatgtgttagggttttttaggttttaatgagtgaaatattaaagattttataaggggattaaaaaaatagttaaatgtaggttattataattagtgcgggaaaattgtttttaagaggatgtaatgtttaaatagagaattggatgaggaatatagttaatttaggtgaatggtaggagaaattttttagggaattagtattataaataaaggtttagaagaaagaatatatagggagtttgggggaattgttagtagtttagggtagagattagagaaagaggagtataggggtaaaaagtaagtttggagtagtgagtagatttaatgattaaggtttgtggggttggggagaatttttggtttttattcgaggataatgtgtagtattggtagtattgaagttaggaagaattttgattagatttgtattttagaatattattttggtgaagtgtgaagaatgaattgagagatgttagattgaatatatggagaagaagaggttcggggaaattttggtaggaattgtagggagaatgttaggatggaggaaaaggtagaaaggattttgagagatttgagtaattaagatttagtgttttatatatggaaaatgaggtggaaaaggagaaaggtttttatgtgaatagtattttatttggaaaaatgatataaaataagggaatttggtttatgatataagaggtttttgggtttatatggtattgagtgattagggaggagtttagttgagtttatttttatagataggtattgagtgttaggtatgttgttattagggttataaggaaattaaaggtatttgttttatatttttgtgatttatatgtttgattttgtttaagaattatgttaattttcgattttttaggatttttagtaattttgtcgtgtttatgtgggaagtgagttgaggtttggtaagaggattttagtttatatggtttaaaaaatagtagaaatatttttttagaagatataaattttttaattaaatggattaatttatttatataagagaaataaaattattaaaaaataaattgagtgaaggaaaagaaattaataaagtgtaattattagaagttcgtgggattttgtatgaaaataagtttgaagaaatagtgaaagtagaagatttgtttaatagtatgatattcgaatgaaaaaaaaattagataggtttagtggtgttgtttttttatagatgtaggaggtttgaaaagtaatagagaaaaatatttggagagaacgttattttagtttttatatagaatgtaagattagtttttttagtgggcgttttttgatttttgtttttagggattcgattttataaatatagtttagttttgtagattatttggtttagtttaggattcgggtttgtaatgattttgtttagttatggtttagtttgtgtatagagattttaagatgatgttcggtgattttgttttttggtattttatttagttgagaatcgatggggtttaaatttgtttttaattaatagaaagtgataaaaatgatgttattttcgtgatgaggttatattatagtcgtatttttgtattattagatgattttgttttttattttttttgtttgtaagttttgatgaagtagaaaggtttatgtggtaaggaattgaagttagtttttggttattagttagtaaggaattgaggttgttagtttaataggtatggaggaatgaattttgttaataattgtttgagtttggaagtggatttttttttagtttagtttttagataagatttagttatggtattttgatgaaaattatgtgagaaagttgtatagttgtgtttggatttttgatttatagaaatgtgggataatatatgtgtgttgttgtaagttgttaagtttgtggtaattttttatatagtaatggatagttgaaaatattttttatagtttttattgagttaagcgatttttggggttagttagaatttattttatttttttttttgtggtagtttttattttttttataggttgatattttattttttttttattagtgtgaatgttaagtttttttattattttcgttattttttttttatattatttaggaggttttattagggagtggtaggtagagaggaggaagtgtggggtgtgggtagatttttttttatggtttaattttgagtgtaggtattattagttggaagaagagaggttaggaattagtagggattggatggagatgagtgaatattttattatttttaggtttatgtaggttgtgaaataaaatcgtgatgaatagattttgtatggtttttgttggtttttattttttagtattttagatagtgtattttatatgttatgatgtaaatattattgattttttttagggtagatataaatttttttttttttcgtatttagtaagtatattttattagtttatgggttattttaattttatgattttttagtcgggattgtggtaaatgtaatagattttagtttagtttttgtgtttggagaagaaagggaagttggttagagtttataggaggaggtgatttatagggagttagtagtaggtgggtgtgagggtgagtatgatagagtagttatttgggtttagtagttagattgtttttttagagttatgagttagtttattgatagttattaaattttttagtgattttagtttttttgtttgtaaaatggggttgatagttgtttttaggttatagggtttttgtgaggtttaaatgatttaatttatgtaaattttttaggaacgtgattgatattttttttaaggtataattttgtaaaagagtgggatttatttatttaggttttgtttttttattttaggtgtgatgaaattagttttttttaatatttattttgattttcgttttatgtttgtaggtggagcgttgttttgttttttataatttatggtgtggggggtaattaggaaaaggttagggtggtgttaagtatgaggaagttatagagtaatatatatatatatatatatatatatttatatttgtttatatatataaatatgtatagatatatatatatacgtatttataaatacgtatatatatatagatgtttatatttgtttatatatttatatgtgtatagatagatatatatatattatatagttttaattttttgatttagtttggggtttgggtaattttagtttaattttttttaagaaatttaagaatttgaaagagaaagatttgagaatttttgttttataagagatagatttattttttaggtattgtgggattttttgagttttatgtggttttgtttttggaagtttatggaggagcgggaaaatttgatttaatattaaggttttgaagtttagaggtagttttaggaattggttttttttgggtattaggttttcgggagtttagtaggtttttttttttttattttatttatgacgttttagtttgttttttatagttaagggttttttttaggttttgttgtatagtaggaatttttacggggttttagaaggaatagggatagagtttaatttaattttttcgggtgatgtatttttaggtttagttttttggttttaatattggtgatattattttttagttttaaaatgtttttttcggttaggcgcggtggtttacgtttgtaattttagtattttgggaggtcgaggcgggcggattatgaggttaggagatcgagattattttggttaatatagtgaaatttcgtttttattaaaaatataaaaaattagtcgggcgtagtggcgggcgtttgtagttttagttattcgggaggttgaggtaggagaatggcgtgaatttgggaggcggagtttgtagtgagttgagatcgcgttattgtattttagtttgggtgatagagagagatttcgttttaaaaaaaaaaaaaaaaaaaaaaaaaaaaaaaaaaaaaagtttgttttttttttgatttgtaaaaaggtttataatttttgatatttatatttgttattttttattagaatttagtagtttttcgtggtatttttatttattgtgtttttgtcgatttcgttttttggtgttttattttttggttgggttaaagattatatgtaattgttgggtatagagggttaggaaagaaaaagattttcggtgaagttagatttaagtattttattgttgataagggtaattattgtttttttttatttatttttttgtatttttttttttttgttttttttttttatttatttatgggagagttttaggagtttgggttagaatttttaatttcgtagtagggaggaggaggaggaggcggcgacggaggaggagaaggaggaggaggaggagacggagattgttcggttttttttttttttaaatatggatgtttttaaggaatataattttagttttaagaggttttgacgtggggtttggaggattttagtatttgtcggtagtattatttttttgttatgttttaggtgtttgagtagttatttagtgtagtgatttatcggggttttttttgtggttttcgcggtttagaattttttttaggtgtgatggattttttaagtcgttttttgagtcgttgtttaggtttgtaggttttcgtttagggatatgaaatttttttgtcgtaggcggatttaaagtgtttttcgaggaagtttttgttcggagttattatttagttagatagtagtatttgtaggtgcggtgttttggatttgttttagggtgagtcggaggcggggttagggaggggagggaggtcgtttcgtttattttagtttttttttttttttgttattggttatagaataagttagttatgatttagattgaaggagaaatttggagtaaaatggttttagcgtttttttatttgagagggattagttgaggtttcgtttttttatttttgggagaatcgggttggttattttggggtcggggcggggtatatttgtgttcggagtttgaggttatttatcggttgattttggtggtggtgcgggtttaggaattttaggttttttagtaatatattttttgcggttttcgagaattttttttagggcgtttatagttttgtgttattttttttattcgcgttttacgttttgattttcgtcgcggttgtggaagtttaggaatcgcgtgtcgtttacgaaggcgtcgcggaggaatttagggtttacgtggtgaaggcggagttcggcggtttttaagtattcggggtgcgggtttgggtttcgggaattcgtatattgcgggcgggagaggcgtagggtgtttgggacgtcgtttcgttcgttttttttttggacgtcgtcgttttgttttttcgcggggatatagttttttttttacgtttcgttcggtatcggagtcgtttatttgggagttttttattgtgtggggggagttggggaggggatagagggacgggaattaggggagggtggtttggggcggcggttttgggagaagtgatttgaggagtttgtagattttagttcgggacggaggcgtcgcgagaggagttattaagttttttaagtcgtttttttttttttgtttttttagtttagtttattttgatttttttattagtttagttttttttaaggttagggtttataaaggaataggaagggggtttcgggatataggattcggtttttttgggtattttggagtttaggaaggattttggagattttttattttatgaagtttattttttattgattttgatggtttttttagaattcgagattaattgataaaggcgttttatttggacgtttttattagttttgggggaaaaataagagttaagggtgagaggtggttatgaggttagggaaatttttgtagaatttttaggagagggaaatttttagagttgtggttttggtttagtttgtttttttattagttatttgttttggagttggagatgtttaagtttaaattagagattttggatattttttttgagtgatataatttttgttttttttttttggaatcgtgggtttagattattatagtgatttagtcggttttttttttttttttttttattttaatttttttttttgagttggatttttcgtttatttttatattttggaaaagtgtagtggtgtgagtatggttttggggtagaattgtttgggtgtaaattcggttttatttttatttttgtgtgatttttatttttatggtattaattatgaaagggaaaaataataggtataagttatggatgtgtagttagaataaaatgaattggtatttttaaagtgcgaagattattatttgatatatagtataataaaagtgtaaaatgttattatttttgttatttttttaggtttttttttttgaggttttttttttttttttgggtttttatgaaaatttattttgttggaagttgatgttagtaagagatttttttttgggaaatgttggtttagtgtggggttttttttttagtaaagggaaaaatcgatggtggattagtagttagtgagttagagtttattttatttaaataagattatttatttagaattaattttattttgataaggatatgtattttatagataagtttagtgtaatttatgaggagattgttttatttgtgtagaatttattttagtgttttttatagttttgtaatatattttgaatttttggtttttattttatattgattgttttatagagtgaagacgatgagaagtatttttatattatatttttacgttcgtttatcggagttatagttatatattatatatgtagatattttttttagaagtttgaatttattgatgtagattttaatttggaatagatagatattatttaatatttttgtttttattatttttaagttatatatgtttaagtagttattattgatatttatgtatttttttttttggtatgtgatattgatataaaaattgtatattgtattttagtttttagtaattattaattatgtaatttggattattttttttattgagtattattggataagtgggaaaagggtatatatttgaaaaatttgatggaaagtatgaaggggttaattaagtagtaaagatttgttaggttaggaattaggagaaggtagaaatttagaagagtaagttgagttgtagggttgtttttgttttgggtgatgttggttgttttgggtagtgtttgagatttttgagggttaggtggataaagtttatatttaaaggttgcgggtgtatatgtggtattgtaaatttttgggattaggatgggttttaaagggttgatttataagagtaatatagttagtttttaggagtggtagtttaatttttgtttgagtggtttagtagtttttattgtttttattaaaaattgtaattgaggatttttttagtgttataaagaagaaaagaaatatatttaaaaaggtttgaaaagaaggtataaaatttttataatttgtaaatggtaatatgttgaatgtagaaaatataaatgattagaatatttttgaagttaataagatatatatatatataaatatatatatatatatatatatatatatttttttttttttttttttttttttgagacggagtttcgttttgtcgtttaggttggagtgtagtggcgagatttcggtttattgtaagtttcgttttttagatttatttaggttatttttttgttttagtttttcgagtagttgggattataggcgttcgttattatgttcggttaattttttgtatttttagtagagatggggttttattatgttagttaggatggttttgattttttgatttcgtgattcggaagttaataagatatttttgtttggtaggtagaagaaattatagagttgttttgtatagatataaaatgaaaattttaaaaaattgatttagtaaaagtgcgtatatataaatttttaaaattaaatttaataaattttgtataagatattaattgggatatttaaaaaattttattgagtaataatagaagatagtaattaaagaagatagtgaattaattgaattaatttattaggattttggtttggatggtttaatataataatgatattaattttttatagtattttaagaatttaaatatattttaattaaatgtttattaagtatttttgtaatatatagtaagttaattttaagttttatattgaaatatgaaagagaaaaagtagttatgatattttaaataagaataataagtagagagaatttttttagtagatattaagatttatgttagagttattttaattaagagagtcgagatgttgagatagggtagtaaattagaatttgggaatagaatagaaagttttgaacgtatgtagagtagaggtaatattatagattagtgggtaaaggaaaacgatttagaaaataatttaataataattggttatttatttggaaaaatgtaattgtatttattttttgtaaaaaaatgtgattgtatttatttttttatagtaatatagtagaatatttttattattttagtgtagggaaagatttttatgtaggttataataaagtattaattttagggtaatttttgataggattaaagatattaaagttgagtttttagattatttggggttttttattttttagtggatagcgataaatgattaaatgtttttttgggaaagttttgtaaaaagaatttattttagagtgaattatagggtttttttttaagggtattagttttttgtttatttgaggggttttgatatattagttggttttggtgtagttattggataagaatttttgaatatttaggatttaagattggtgattgtttagtagatttagtagtttttatatttgtatgtgttatgtggtattttaatgttttggtaaggggggtatttttttagttttttcgggagatgtggttaggagatgttaagtaggttgtatataatggatatatttttattttttcgtttttttgagttgtgtttagatatttttttttgtagtatgtttgtgatagggattttgttgatataggttagtggtttttataaattgttgtatatagtaaaatttggagagatgatttgttttaataaatttaaggttttagtttgttaaattagaataatatttgggtttgtgtagttttgttataatttttagatgattttgatatatattaaatattgagaattattgttttgagttattagtttttaatttggttgttgattggagttaaatttggagagttttaggaataatattgtttttaggattttatttttgatgaattagattttattggttttatatgttgatttagatttggggttatttaaaattttttacgtgatggaaagtttagttaaatttgagaaatattgtgttaggttatagttgaattcgggttttaattagttaatttggttgattattaatattatttttaggtgtttaaaataatatatttaatttaagatattgggtgaagattttatattgatgaatttaggttaattatattttatttttttttatgttaatattgaaagttatggggagaaatttttttaattagtgttttttattatttttttcgtgatgatgtttttatttagtcgattttaaataaaagttagaaagtaaggttgttttttgtggtttagtaggttatgtagtatagtgtttaggatacggagtagggagagtatatggagtgtggattaggagtgtatagagaagatattagtagatttgttttttttattgtatttaaaattatattggattttttagttagtgtaattaggtaatagaatatattaattatatgaattaataaaagttttaagtaaagttattgaattaaaattatataaaattatttatatttatatatattataattaatattgaaatttaataaagaaagagatattgtgaatattagtattatattttaagatttttggaataaatttattaaaagatgtataagtaaaattagtaatattttatttaagagtatttaataagtaaatattatatgtttatgaattataagttttaatgtggtaaaatttgttagtgttttttaaatttgattattgaatgaaatttttattaaaaataaaattgttaaaggtatttggaaaggtgtttgttaagttaggaaagttgttaatgatagaaaaaatatttttgaagtgaaaatttaaaatttatggatttattttattgtatagagagatatattataaagtcgtggattattttgggatgatgaaaatgttttaaaattaaatatgtagatttaaaattttgaatatgtgaaaaattattgaattgtatattttagatgggtgagtagtatgtgatttatattttaataaagtttaatgaggaaaatataatgagatattttgaaaaatgtattagaatttttatattaaaattattgagttttttaaatattgatgagaatatagattattaagatttattatatattgtttgttatagttattttatttagtagtgtggtattatttttttgagtgggatattatatatatatattagtaattttatttttaggtgtataattttgatagatatgtgtttattgtgttaatagattagtgttagaagatttgtaatagtattgtttgtaattttaaaaaatttgataataaatgaaatgattataaacgagagaagggttaatttaatatatgatgtatttatttaatgaaatgttataaataataaatatgaatattttatagatatttataaaaatttagtaaatatatatttgatttaaaatgaggttttgtaagaatatatatagtatgattttatttgtatgaaaaatttaaaatttatataaagtttgagataatttgtgttgttttagaaatatatgtatggggtaaagttttaaagaaagatatgaataggattattatgaaattagaatgagggtgaattttaacgatagaaaagggattgttattgttatgggaattggtatgaaaatttttgggttttttttttgagttttgttttttttttatacggattttttttttaaaattatgtgttaaaatgtaaatgtaatttaagttttttatttttggttgtaatttaatagtgtaaaattggttttaaaaaaagtaatgttaattatttatttgtagttggaaaaattaatttttatttataaaagagatggatttttttttatattatttattagagaagagattatgaattggaatgggaattcggaattgttattattttataattttatttaggattttgtttttaaaatattggtatattgttgtttagtttttttttgtagtgatggaatgtttatatttgtgttgtttattacgttagttatcggttatttatgaattttgagtatttgaaatgtggttagtataaatgagaaattgggaaaattgatttttaaaattaatataattttaattgatttaagtgtaaatagtgttttgtggataaggtaatattataaaaataaaatgtagtattcgttgtttttgtttttttgtttagttatgtatcgtgtgaatgatagttttattgttattaattttgaaaagattttatttcgaagaaaaatggaattttagtttttttaggggtgagatttttttgaatttagtatttaataaaatatttaaattatacgaaaggattttgtttatttttgttttttttgggtatagaaaaatatgttgaatttttatttgtatgcgaaataaaggggtttttaatgggaaatttttttgtaaggtgagaaatttattttaaatatagttttttaattttaaatgttttatttaagttgtttataattattattgtttggttattatagtgtaaatattttttaaattatttgaaatttaaaaatatagtaatataattttatgttgtgtgtgaaaaggattaaaaataaggtaagtttgtgttagtttggtaaattattataatataagagtgttgtataatgtattaagtttaatgtaaaagataatgaatattttatatagtttattaaattaattagaaatattttattgtgaatgtggaagggaagatgaatagaattttaaatatattgggtgtgtatagaggattagaatcgtgaatttagtattatttttatatattttttatttatttagagagattttagtatttattatgttttaggtatttttttagatgtttttgatgtattaaaatatatttaatttttgtattaattttaagaagtagttattatgttaattttaatttacgggtgagtagtaattttgcgtaattttagttaagggtatgataagtttttatagtttttttgtagtttttatttttaaaatatggtttttatttattttttttttaattaatgtttaaatatatttagtaattggttatgttttgtaggataatttttttgttatttattttataatgatttagtttagtattaaattttatggaatttttttttagtttgtaaattagaaataaggtaggtatttattttttgttgatattttttaaattttattgtatataatagttttttttaaataggattttatagaattagtttaaggttgaatttttaatattaaaattttatattaaaattgtattatttgttgtttaggttggagtgtagtggtattattatagtttgttgtagttttgaatttttgggttgaaggaattttttgttttaggtttttgagtagttgggattataaggtatgtattattatgtttggtttggtatttttttttattagatagtagagtgaagtatttgtattataaaaataaaatatataaaaattacgacgattttgttaatttaatatatgattttaaatggtagtggttaaattaggagttagttagttatttttaaatatgttttttaaaatgaaattttaaagatagtgttattgtttatttttattattatttataggtttagttgtggttttgttatagagtttgttaagaaaatttttttgagttgttttaaatggttttttgaaagttaaatattgtaattttataattattggaattgggaataaacgatacgtttttaggttttattttattataatttaaaattttagtgatggtaggattatttttttttattgattttttttaatatatttaaagtattgataattgtgtttagttagttgtattttatgttgaattatttgattatgtgaggaaagtagatttttggatttttagtttattttgattagagggattagtaaaaacgtggaatgaagaatttttttttgtgtatatttttttttttgtgtgtattgttttttatttatatttttgggtatttatatatttgtgattgtatttttttgtattaatttggaattatttattaattttatagttaagttaataaaatggttaaaaataaattttatatgaatttttttaaaatttattatttgatttatttatttattttaaatttatgttaaatattattttttaaattttattttgtattaaagttgtttttatttattaatttaattaaatggtattgaaatttgtagtaagaggtatttaagaaggtagaatgtttttatttgttttgggattttaataggggtagaaagatgtgaaaggtagagggaaaagaggttttatagaggtagtttagatataatgatatttgtttttttggttagaagttaatttttaggatttaggatttaggaataaagtgttttaatatttagaaggttttttggttttttttgaatttagtgtttagttggttagggttaagatttttatatattttggtttgaggatttaagtatagaatgtggttgtttttgggatattttatattaaagaagtttagtacgtatagataaagggtttagaggttattagttatttttttatgtagttttgtttaaggtattttttcgtgttttattatttatgttggttacgtttttaggagtttagagaaatggtcgtgttgtttttgagtggaagtgaggggaggatattaggatagttaggattttgaatttttgtgttttttttttttatttttattagagattatttgtggaaaaaaaagatacgaatgttagaggtgaatttaggtttatggatttattgtggttaggggattgaagttaagtggtttaatagtgatgaagtttatgaggttttcgttattttaaagttttttcgattaggagttgttttttattgttattagggattttaggagttggatatggtattttttgttattttttatgaggagttggagaggttttagagtatatagattttaattaaattggagttagagtggagttaggtaaaattttttattgggtaatataatatgtttgttttaatttgttagagttgttataataaagtattatatattgggtgatttaaataatagaaatttattgttttatagttttggaggttggaagtttaagattatggtgttggtagtgttgattttttttaaggttttttttttggtttgtagatgtgttttttttttgtttttatatggttattttttcgtatttgtttgtgtttaattttttttttttatgaagatattagttatattgaattagggtatatttatatgattttattttattttaatgatttttttaaaatttttttaaatgtagttatttttttaggtattgggggttaggatattaatatgttaattttggggggatataatttagtttataatagtttgattatttttgagattgtattttttaaagaataaaatagagtaaatttttttggttttgatattttgaaattttgtttttgtaatgagaataaaaaaatggagaattaaaggttggtgttatttagagggtgagttttttttaattttggttgttttaagatttggtgttgtgttatattagaaatttttgttttattttagtgattttagtattagatttttagttggaaagaggatgtttttttaggggaataattttttttgttgtgtaggtttattttttttatatttggagggaaaaaaaagttgatgtaataaaaagaatatatttgttaaatttttttggtaattattttgatatttttattaatattttatgttgtgatgaatatgttggttttattttggtggaagggatatgacgttggttattttgagttagaattttttgggtttttttataggatttagtttttgttatggtggataaggggagagtttttggtgtagggtttggtttttataatgaattatgttgtttgggtaggaggtttatttttggaaagttgaaggttaggtaggagtgcgatttttttttttatttaaaaggttagggtagagtaggtttttgtttagggcgtagtgagtgagagaagggaaagtgatagagagtatttttttatttttttgtgatatgtatgtatttaagtttttggtgttttaaataattgaaattgagatttagttttatttatttataaagtagaattgtggagaagggagtatatcgttttcgttattggagagatttttgaagagagatttgtgagtttttattttattaaaaatgatataaaattttattaaaataaagtgaaattgtgggtgtagatggggttttatttagagtttcgattttttatttgttttttaagatatgatttttttttaggatattatagaattatagggtttaaattggaggggtaaggcgtaatggtgttttttttttttggtagataggatgttttgaattgtatgtattttttaaagagggttgtaaaaatatttaaatattttttatcgtatttgtttttttttagtttgatttattatttttttattaagaggtaagttttttttattttttaaatataagtagatttgatatttgcgttatttaataaaatatggtagaagtgtggttgtgttagtttgggtattgttgttaattattttgtttgcgtttggttttttttattttaatttttggattatgtaatatttttaggttattatttgagtttagttaatatatagaattttataagagattattaaaaatttttagttattatttttgtgaatatttttttttgtttttttaattttaatttttgtgtgtcgttagatttaaagtgagaattttttttttttttttttgagacggagttttattttgttgtttaggttggagtgtagtggtacgattttagtttattgaaatttttgttttttcggttttagtaatttttttgttttagttttttttgtaattgagattataggtatttgttattatattcggttaatttttttttatttttagtagagacggggttttattatgttggttaggttggtttcgaatttttgattttgtgatttgttagttatcgttttttaaagtgttgagattaaaagtgtgagttatcgtgtttagttagattttttttattttgtttattgtgataatttttgaattttgattgggaagtttaatttatttatatttatatttaaagtaattattgataaggaaggatttatttttgtaattgtgatgttggttttatgtatgttttatagttgttttgttttttattttttttattttaatttttttttgtttttagttattttttatttagtcgatttttttttagtgatatgttttaattgtttttttatttttttttgtgtatattttatgtatatttttttgtgattattgtggtattatatataataatatagttataataattttgaattgaaattaatatgaaattttgtttttttatatttttttttattttttattttacgttattgatgttataagttatatttcggtaggttggaaggttggaaagttataatgttgtagtttttaatttaaaatttgtagattaggttggtagattggaaatttaaagtgtagttgttattgttattttgaggtagaatttttttttttttgggaagatttatatttcgtttaaaggtttttaagtgatttaaaaagttttatttatatgttttagggtaattttttttttatgaaattaattgatattagattttaattataattgtaaaatattattatattaatatataaatttagtgtttgattaaataattaggtgttatggtttagtaaaattgatatataagatttattattttagtttatgtttgtgaatttggtatttattaatattttttttaaattttatttcgtttttaaataaaaataattataaagttttatttttgttaaagatgatataattaatttgtatttaattagaaatatattaattttttttatagaaaaagatgtatgatatgtatttttttttttgatatattgtaatttaaatattatgcgtaataaaagttaatttttattaataaaagggaattattgttagtatattttatgttttattatagattattaggaaaagatgaaaagaaaggtatttgtttaatatatgtaaggatatatatatatagatataaatattattataaaaatataaagaagtaatgttgataatatttattgttttttatttttgtaagtgtttatatggttatagttggttatttatttatttatttatttatttatttatttgagatagggttttgttttgttgtttaggttggagtgtagtggtattattttggtttattataatttttattttttgggtataagtgatttttttattttaattttttaagtagttgggattataagtatattattaagtttgattaattttttgtaatttatttttagtagagatggagttttagtattttgtttaggttggttttatatttttagatttaagtaatttatttgttttcgttttttaaagtgttgggattataggtataagttattgtgtcggttataattagtatttataaatattttttttgttgttttttattaattattttatatttttattttttttagtaagttcgttagttgattaggtttttttttttgtttgggtgatttaaatttttatttttgaagggtatgtgttattattagttttatttgatttgggttgttgtcgtttttattgattttaattatacggtagagtattattaagagatgttttaaaagattttttgtgttttagatatagttttatttattgttattgtgtagtagtagattaattttttttgatggttaggattaattattttagatagtgtagtaatttttttttttgttgatttagaattatgaggttttgaagggtttgggtagttgttttagtttttagtttaatggtttatttttgtgttttttgtgggagtattttttttttagtaaatttttagattttgattttgttttttttgattgggtaagattttttaattagggtttttagtattttttataggtgtgtttaggttggtaataagtttgtatttttttggaatagattttttagaggaaggggtagattgttatttttgttgttatatagtttttattggtgatatttttaggtattggaaaatttgaggtaattagggattgtagtaggtttttagtaaattgtatagttttatagaaaagtggttagattgttaaaagagaaaataaaagaagagaaaaaaaatttatttaaaggttagtaattttaaagattgagggtagataagtttatagagatgagaaggaattagtaaaagaatttgataattaatttgatagaggtaaaaaatattttataagaatttcgtggtgtatttataagtattaatagtagaatagagtaagtggagaaaagaattttagtgtttgaagattggttttttgaaataagataagaagataagattagagaaaaaagaatgaaaaggaatgaataaaatatttgaaaaatatgggattatgtaaagaaataatgtatgaatgattggtgtatttgaaagagatggggagaatggaattaatttggaaaatattttaggatatgatttatgagaatttttttaatttagttagataggttaatatttaaatttagaaatgtagaggattttagtaagttgttttatgagaagattatttttaagataaataattattagatgttttaaggttaaaatgaaagaaaaaatgttaagggtatttagagagaaaggttagattatttataaagggaagtttattagattaatagtggatgttttagtggaaattttataagttagaagagattgaggtttagtatttaatatttttaaagaaaagagtttttaatttagaattttatatttaaataaattaagttttataagtaaaggagaaattagattttttttaggtaaataaatgttaagggaatttattattattagatttgtattataagaatttttgaaggaagtattaaatatggaaagatagttattagttattataaaaatataatgaagtatatagattagtgatataataaagtaattatataagaaagtttgtaaagtaagtagttaatattatgatgataggattaaatttatatatattaatattaattttaaatgtaaatgggttaaatgttttatttaaaagatatagagtggtaagttggataaagaattaagatttattagtatgttgtttttaatatatttattttatatgtaatgatatatataggtttaaaataaaaagatggaagaaaatttattaagtaaatggaaagtagaaaaaaagttagggttgtaatttttgtttttgataaaataggtgttaaattaaaaaagataaaaaaaaagataaagaagggtattatataatggtaaagggtttaatttaataaggagatttaattatttgaaatatatatgtattttatataggaatatttatatttataaagtaggtttttagagatttttaaagagatttagaatttttatataataatagtaagagattttaatattttattgataatattagatagattattaagatagaaaattaacgaagatatttaggatttgaatttagttttgtattaaatggatttgataaatatttatagaagtttttattttaaagtaatggaatatatattttttgtattgttatatggtatttattttaaaattaattatataattggaagtaaaatattttttagtaaatgtaaaagaattgaaattataataaatagttatttggattatagtgtaattaaatttaaaataaagattaagaaatttatttaaattatataattatatagaaattgaataatttgtttttgaacgatttttgggtaaataatgaaattaaggtataaattaagaagttttttgaagataattagaataaagatataatgtattagaatttttgggaaagagttaaggtagtgttaagagagaaatttatagtattaaatgtttatattaaaaagttagaaagattttaagttaataatttaaaattataattaaaagaatttgagaataaagagtaaatatatttttaagttagtagaagataagacgtaataataaaaaattaataaaggtattgttttttgaaggagatagagatatgaaaaattatttaaaagattaacgaatttaggaggttttttttttttttttttgagatagagttttatttttgttatttaggtaggagtgtagtggtgtgatttcggtttattgtaattttcgttttttaggtttaagcgatttttttattttagtttttcgagtagttgggattataggtattcgttattatgttgggttaagtttttgtatttttagtaaagatggggttttatttcgttagttaggatggtttttattttttgattttatgatttattgttttagttttttaaagtgttgggattataggcgtgagttatcgtgttcggttattattattgatattttttatagaattagaaaaaattattttaaaatttatttggaattaaaaaagagtttgaatagttaaggtaattttaaataaaaggaataaagttggaggtattatattatttgatttttttttttttttttgagatggagttttattttgttatttaggttggggtgtaattgtgtaattttggtttattgtaatttttgttttttgggtttaagtgatttttttttttttagttttttgagtagttgggattataggtatatgttattacgtttagttaattttttgtatttttagtagagataaggttttattttgttgattagattggtttcgaatttttgattttatgatttatttgtttttgttttttaaagtgttgggattataggtatgagttattacgtttagtgtatgttatttgattttaattatattttaaggttatagtaatcgaaatagtatggtattggtataaaaatagatatatagattaatggaatagaatagagaatttagaaataagattatatataattatgattattgataaatttgataaaaataagtaatggggaaaggattttttatttataaattgtgttgggataattggttagttatatgtagaagattaaaatggaattttttttttatattatatattaaaattattttaaaatggattaaagatttaaatgtaagatttaaaattgtaaaaatcgtaatagaatttaggtaatattatttaggatataggtatgggtaacgattttatgataaagatgttaaaagtaagtgtaatataagtaaaaattgttaaatgggatttaattcgattaaagagttttgtatagtaaaagaaattatcgatagagtaaataatttatagaatgggggaaaattttttgtaaattatgtatttgataaaagtttaatatttataaggaatttaaataaatttataagaaaaaataaaataattttattaaaaagtgggtaaagtatataaatagatattttttaaaagaaggtatatatgtagttaataaatatgaaaaaatgtttaatattattgatgattagagaaatgtaaatttaaattatagtgagatgttattttatattagttagaatggttattattaaaaagttaaaaaataatagatgttggtaaagttgtggagaaaaaggaatatttatatatttttggtggaagtgtaaattaggttagttattgtggaagatagtgtggtgattttttgaagatttaaagagagaaatattattttatttaaaggaatataaattattttattataaagatataggtatatatatgtttattgtagtattatttataatagtaaagatatggaattaatttaaatgtttattaattatagattggataaagaaaacgtgatatatgtatattatggaatattatgtagttagaaaaaggaatgtgattatgttttttgtagggatatgggtggagttggaagttattatttttagtaaattaatgtagaaatagaaaattaaatattgtatgtttttatttatatgtgggagttaaatgatgagaatgtatagagatatagaggggaatagtatatattgggtattggggatttttagaaggtggagggtgggaggaagaagaggattagggaaaataattaatgggtaataggtttaaaatttgggtgattaaataatttgtgtattaaatttttataatataagtttatttgtaaaatagtttgtatttgtatttttgaattgaaaataaaagttaaaaaaaggaattgatttgtggattttggttgttgttgagtaggtttattttaattatgtaaataagtattgaggaaataattatagagaggttaggggtttattgggattattgtgagaatggtttatgtatgttagggttttaggttttttattttttttaatgtaattttggtaggttgtttgtttttaggaatttatttattttttttaggttttttagtttgttagtatataattgtttataatagtttttgatggttttttgtatttttgtaatattagttgtaatgtttttttttttttttttgattttgtttgagtttgttagaaataaagttcgaagttataaagaaaatgagtatttgaataaaggattttttagtaaggtaatttttatttttgtagaagggtgttatttgtaagtttgattgttacgagagtatttagaataagggaaagtaggggtttttatttttaatttaagttgtttttattattgtgttttgtgtttattggttggagttggatcgtatagtttaaattgatttcggttggttaaaaattttaatttttttaaataaggtaaaggtgtaatggggaataaaggaaaggagggggttatttatgggaaattaggaagataataagatttttaaataaggtaagagtataggttgtaagttgggatatgtttgggtatgtttggttagatttaggtagattaggagttaggttttggtttaagtataagaatatagaatgtgtttatttttttattgtatgtaataattatttggagtataataaagaattattagtaaattagaagatttgttagtatgaagagtaagggaaatttaaagaaagattttaagaggaattattttttttttttgtttgttttttgtttgtttgttttgagatagagttttattttgtagtttagattggagtgtagtggcgtaatttaggtttattgtaattttcgttttcggggtttaagcgatttttttgttttagtttttcgagtagttgggattataggtacgtgttattacgtttagttaattttttttttttgtttttttttttttttttttagtagaggcggggttttattatgttagttaggatggtttcgattttttgaatttatgatttatttgttttagttttttaaagtgttgggattataggtgtgagttgtgcgttcggttgaggaattatttttttaatatttattatttttaattaaaaaggaaaattttggagaggtatttttattttttatagttttttttttttgattttatagttttttttttttaaatttttttaatatattttgattttgttgttttttttaattagttagaaagaataatttatttgagtaagggtgaggagaattgaaaggggttttggtaagagttttttttataagtttttgtattaatttatgaatgtaagatataatataatattttataaggataagtatattgattatgagagttagtgaggtgagaattgaggatatgagttttttttatttagtaaattatttttttattaagttagtgaaaggattatttattttagagtttttagttagtttatttgatgaagtagtaagattttgtagtgtttttattatagttcgattaggggtagtattattaaggataaaagtataatattgagttttaattataatataaattttgtttttttttgttagtattatgtttagtgttgttttatttttttaagttatttgattggtgggttttagttgtttagttatttttttatagtattttttgtgtaattaatggggttagttttcgttcggttagttatttcgttagggagggaggtggggggttagttttcgttcggttagttagtttattcgggagggaggtgggggggtagttttcgttcggttagtcgtttcgttcgggagggaggttgggggcgttttcgttcggttattgtttcgtttgggaggtggggggcgtttttgttcggtcgattttgtttgggaagtgaggagttttttgtttaggtcgttatttcgtttgggaggtgtatttaatagtttattgagaacgggttatgaggacgatggtagttttgtcgaatagaagggggggaaatgtggggaaaagaaagagagattagatcgttattgtgtttgtgtagaaagaagtagatatgggagattttattttgttttgtattaagaaaaatttttttgttttgggatgttgttaatttataattttatttttaatttcgtgttttttgaaatatgtgttgtgtttatttagggttaaatggattaagggcggtgtaagatgtgttttgttaaatagatgtttgaaggtagtatgtttattaagagttattattattttttaattttaagtatttagggatataaatattgcggaaggtcgtagggttttttgtttaggaaaattagagatttttgtttatatgtttatttgttgattttttttttattattgttttatgattttgttaaatttttttttttaagaaatatttaagaatgattaataaatattaaaaaaaaaaaattaattaaaaaaaaatgaattattgttgattgtagtaaatataatttatttaatttatattttttttttcgagatggagttttagtttgtcgtttaggttggagtgtagtggtgtgatttcggtttattgtaatttttaatttttaggttgaagtgatttttttgagtagttgggattataggtgcgtgttattatatttagttaatttttgtatttttagtagaaatagggttttattatgttggttaggttggttttaaatttttgatttcgtgatttgttcgttttggttttttaaagtgttgcgattatagacgtgagttattgcgtttggttatttaatttatatttttattgatagttatttatttgaataatgatttaaattttgtagttatttggttttaagttttaaatttatttggtattttaatagtatttatataaacgttgggattaaaagatttataggaatagtttttgtattacgatgtttagttgttaatatttttgtgaatgaaatgttagggtgaaagagatagttaattgaattagagtgtaagtattattttagttatttggtagagttttttataaaggtttattataatattattatatatttgttcggggatggataagggaggattgatgggttagtttttggaagtgtttgattttattgtattttgttaggtttttaaggaaagttaagttttttttttgttgtgagagatacgaagtaaatttggttttagaagatggaggttgaatggtttttgggggttgattcgtagagtgttgaattttagggaatagtaaagaaagtttttgatacgatttattattttaggttgtgaggttttggagtagagttattatgtagtttatatttggtttattataagattatttgagtggaaaggggatagtttgggtttttggtttgttttgtgtttaagtataataatcgtttttattttgagtgtggatggatatttaatttattttagttaggtatttgtattttgagattttgttttagtggttagagtttattttaggttttttatttttattatagttattttggttttgttattgggtataggtggggtgatggtttgaggaagatgtgttagagaggtggaaggggtaataaagtagattttaaaaatttttttaggatttttttttaagatgttggtttttatgttataaatacgatttaatgaagggaaagagttttgggatgttgtaatagtaatagtaagtcgaataggattatattggttatatggataatttagaagaggtaattttttttgtaaaatggatatatggttttaaggattggtaaagattggtgggagtagtttagtttggatttttggtgttttataggatattagattaagtatagtatagggattttgttttaaggggataagagttttatttttattagtttatatagttattatttttggggttattatgatttttataagaatttgttatatttttttaatttgaggaagtttaagagggataaagatatttatttgaggtagtaagttgtttttggttttgtaaatttttataaggtatgattagagaagtattaaaggtaataattttgggtaaatttgatttagttatattaatgatgagatgggggtagttaagggaaagaaaagaagaaaaagagatagattaagtttttttttttatcgttattttggtgggagttgacggaataatggtttatgtttttggagaaggtgacgtttatttgattcgagtataatgggtttatttttttttagtggttcgaattattgttttagttgttgtgagtattagatagggttttttttaggtaggtttaagttttttttttttttagtttttgataaggacgtgtgattttcgggttgatgttggtgggtttagaatttaaggggtggagtttgtgttattagattttgagttttgagggacgaaagagtggaagatagattaaatatataatttttaaggaattgattttttgtttcgattataggaaggttagtagtagtgtttagataaggtaatttataaagtattttataaggagataagttaagattttttcgaggagaagtttgtggatttttagtaaagtaatgggaagagattttgtttatggtaggcgagtttttaaaattaatttggttagatgattttttaaagtttgatttattttttttatttttttagatgaaggtggaggttaggaagtatgatatttttattttatttttaatatttggattagttttttaataatgtatacggtaaattgggttttattatttgaattaatgttttttattattttaaatttgggtatgatatgttttaatagagttttgattatattattggttgttgaatttggaaaggggatggtttttatttagtgggtaagatgatttattattatcggtaaatatttaaggcggtttattgggggtattttagtagagttaatttggatattttgaaatcgttttaatttaggattttttttttcgggaggttgttttttgagggtttgtttattagattttttgtatagtatataattttttattatttgtttggcgagggtgtatatttttatgtatttataaattttaaggattgtattatatatggtttgaggattttagtgatatttttgatgaagttgtgataatattttttttataaggtttgggtaatattttttttttatttggtaatatttattttttttttgagttttttttagtttttattttttttagttttttttgatttatttgagagaagatagggagtgtagttgaagatggaagataaggggttagtcgaaaaatgggttttgttggagaagaggtagtttgtttggttatttggttagtgagattatttttttggtttttaaataaaggatttttttgatgtcgtgggatatgtataatagttattttttttggtaattgtaaattttttagtatttgtattattaggtttttatggtttaaaatttgatttttgttgttaatgaggtttcgtttagtttaaatttttttaaaagtatggattattttaaaggtatatttggagtttgtatagattgttgttttttgatttgtagaaattttaaggtttgatttaatgtgaataatttatatgtttgtgtagattagttatttggtaattttttagattttatttttgtgagggtatttttatttatcgttgaatattcgttatgttttttttttttgattattcgggaggaattatttataaataggtgttttttagtatgaaagggtgttttatttagattaggtttaatttttgtttgataattaattaaatttaaatatttgtgttttgggtaaagattaggggtttgtgggttggggttttttgttaagaaagtagttggattaattgagttattagtggttaagattagattatttttttttaataagatggttttatattttaaaatttttgaattaataagttatttttttgttttttgattgagaattgtttttatttgttgaggagtattaatgataagatttttttaaaggttaattttttgtttttttttatgagtaaggttgttgttgttattgatgggatatattcgggttatttatgggttattgggtaaagaatttttgataagaaggttatgggttgttaatggttttcgtgtgtttgagtaagtatttttaaggttattttattatttatattaataaaaagatgaaagggtaattttaaagagggtaaggttagaatatgggttgttattagtaatttttttaatttttttatttgttgtattttttgtaaaattatataagggggtttaatttattttgtgtaagttttttttatgtagaggtttggttattaaagtataagagtttttttataagtaataatattttattaattttaaaaattttttaagttttttttttgttttaggatattatatgaaggatatgatgtttttaatttatttaaatttaattttttatttgtttttattgattaagttttttaaatatttgattttaggttttataaatcgaagtttgtttttttgatatttataatttttttagttgtaaattatttttaaaaaatttattgaaaatttttttattttttgtttatttttttttgaaataaggatattatttatgtattgggagtaggtatatatatggtggtttgtaaaatttttttatgatttgttttagtatttgattaaataaatttggagattttgtaaatttttggggtaaaattgtttatcgatattgttatttttaattagagtgagggtttttttatttaaaggttatttttgttagtgggtaagtttagaaggtattttttagatttattattgtgaattatttatggttgtaaggaattttattaataatagtataaggattaggatcgatagagtgagttgtttgaattatttgattaatagatcgaagattttgtattagtcgatatgatttttttggtttttttataggtagtatgggagtgttataaggagatatatagggtttaatgagtttattatggagaaggttttttattgtgggttttaaattgattttagtttttaagggaattggatattgttttttttttattttttgttttaggttttttaatttaatttggattggggaaatttgtaattttttttagttttttttttttgattatatatttggatggatgtattttttatttagagtagtaagtaaatttaaggaggggaggagatttttttgattaatataaaggtttaggtttaattttagtattaagtttttttttaataggtttttttttgtttttaggattaatagaagtttaatatttattgagtggttttgatatttaatttttgtttttttttaagatttttgttttaaatttttttttttttgtttttaaaataaaaagttttttttgtgattaagttatattagggggaagataataaattgaggaattagtagtttttgagttaattaaaaaggtttgggttttatttttaaatttattaaggagttttggtgggattcgaggtaaaaagagtagagtttttggttttttatttttttttaaagattataagtgggtgattttttttttttttttttatttagggtattttttttaaagtgatttttttttttatatttgaagtatttattttgttttatttttttttttatttttttgttttttggtttgatttttttatttttattatagggtttggtagtcgggtatttaaaagatttattagtgatatttttttgagttgtttattggggagttttttgttgtaagaatagtataatttttgttttgtttttttatttttttttattttttcgtatatatattttttgggttttttttaagagtttttttatgggatagtttttttaattttttgttttttgtaattttttggtaatatttggttagttatttgtgacgaagtgaagttttaatattttttgtttaagtgggttttttttatttaaattaagtatatttttttatttgttttttaagtttgttaaaaaattttataagttttttattttttttttgttgtatattaaaagttttggttatattttgggtgtagggtaacgattttttaattttttttattattattttttgtaggttttttatattttttttatgagttatgttgttatttattttattgggaattttgagtaggaaatttttgtttggttgtagggacgttttgattaggaggatgtttatatttttaaatggttatagtagttttatgcgttatgtttttttttttttttgaaaaaagaatgtttatgatggatattaatttagtttagtatataattggagttttaaaaattgatgaatttgatttgttattatatagagatcgtttaagagtggtttgagttttttttttaagttttagatttttgaattggttaggggagtatttataaaggtaatgttttttttttttagagatattttttttaatgggaagtggtttgtagttgaatttttagaagaagggagaaaatggaagttttggatattatttttatattgttttaatttacgttgaagtttttttgagggagggtatttaagttggggatgattttaagaattagggttataaggagggaaagaaaatttgagtaggggaaaggtttgggattgttatatttattggagtgggaggtgggggatgttggtttattggttggggggaagaaggtttggtgggggaaggtggtttaaggggttttatgtgttggtggggtttttggcgtaaggggtattaattttatgagaagtagtttttggttttttttttttagtttttagatgataaaggaggatgggtttttgttattaatatagagtataatgtatttttttttgggaaataggatttttattatttatatattttattaaaagttggtagtttaatttttatttgattcgaattttggttagaaaattgaaggttttagaataggttttttggtttaaatgaaataataatattttattatttgttgtttttttttatgtttagttttttcgtgtatttttaatattttaatatgagttttaaaggattattagaggtgattttattgtttgtttttttttttttattttttgttttatttagggtattttttatgttgaatattggttaggtttagttttttgaattagagattttttatttatttttttttggaggtttaatttttattttggaggttttttgtaattttttttttttgtttcgtttattttggttgtttttttagaggaaattaggttttttttagtattagcgggattgtataaattttaatgttaggatttttataagagggttattataagtcgtatgaggtgattatagaattatagattggatttatttattttgtatagtagtagtgtttgttattttttatattttttaatttttagaatatttcgattattaaggaaatattgttgtttttgtgattttttttattttggtttgtgtatagttatttggttattgcggtatttgtaggttttttttttttatattgttgagagtttggatttattcgttataatgggtagttttagtttttcgtttttgggattattgtagtggggtagtggggtgtattttttttagatggggtgattaaagatttttttttaaagaagaatgggaatagtggatgagtttttagaaaattgttagaaataaagttcggagttataaagaaaataaatatttgaataaaggattttttagtaaggtaatttttatttttgtagaagggtgttatttataagtttgattgttatgagagtattagaataaaggaaaataggggtttttatttttaacgtaagttgtttttattattgtgttttgtttttattggttggaattggattatataatttaaattgattttagttggttaaaaatttaaatttttttaaataaggtaaaggtgtaatggggaataaaggaaaggaggggtttatttatgggaaattaggaagataataatatttttaaataaggaaagagtataatttgcgagttgggatatgtttgggtatgtttaggtagatttaggtagattaggggataaaggagttaggttttggtttaagtataagaatatagaatgtgtttatttttttattgtatgtaataattttttgggggtataataaagaattattagtaaaatagaagatttgttagtatgaagagtaagggaaatttaaaggaagtttttaagaggaattatttttttaatatttattattttaaattaaaaaggaaaattttgaagaggaatttttatttttaataaattttttttttttttttttaggtttgtttagttagtggtttattaattttgtttatgtttttgaagaataaattttttattttgttgattatttatatggtttttaaaagtttttatttagttttattatgatttttattattttttttttgttaatttttgatgtgttttttttttgtttttttagttttttgaggtttattgttatattgttaatttgtaatgtttttattttttttaggtaggtatttatttttataaattttttttttagttttgtttatttgtattttataggttttggtatgttgtgtttttatttttatttgttttaagaaattttttaatttatattttaatttttttgttgatttaatggttatttaggagtatgttgtttaatttttatgtattggttttgttgttaatattttttttggtgtatatttttagttttattttattgtggttagagaagatatttaatgattttaatttttgaaaatttgtttagatttgttttgtggtttaatataggtttttttttcgaaaacgttttatgtgtttatgaaaggagtgtatattttgtagtgttagatagaatgttttataaatatttgttagttttatttggtgtaaaattttgtttaaatttaatgttttttttttgattttttatgtagatgatttgttttatgttgaggttgggatgttgaagttttttattattattgtattggagtttattttttttgttagatgtagtaatatttgttttatgagtttaggttttttagtgtttagtgtatatatatttagaattgttttattttttttttggaaggatttttttatgattacgtgatggttttttttattttttaaaaaagttgtttttgatttatagtttattttatttgttataagtatagttatttttgtttatttttggtttttatagataattttttgttatttttttattttttgtttttatggattgtggtgaggtggtattatcggtgagtttttttataagtagaatgtagttagattatgttttttatttatttagttattttaaattttataagtggagaatttaatttgtttatattttagatttttattaatatgtgaggttttgtgtcgagattagtttagtcgggaagattttaatttagtggtattagaggaattaaagatatatatatagaaatatagaggtgtgaagtgggaaattagggattttatagtttttagagttgatagtttcgaatagagatttatttttatatttattaatttaagttagtgataagtattgtttttatagattatagattaattaaaagtattttttatgggaaataaacggatgggttaaaataaagggatgggtttggttagttatttgtagtaggagtatgtttttaaggtatagattatttatgttattgtttgtggtttaagaacgattttaagtagttttttcgtttgggtgggttaggtgttttttgtttttatttcggtaaatttataattttttagcgtgggtattatggttattatgagtatgttatagtgttgtagagattttgtttatggttagttttggggttagtttatggttagatttttggaggtttgtttttaatagttttgtttttattatattgttgttttcgggttgttttatatgttttttattattgttttttttttttattgtttgttattatggtttggtggatttttgtagtaggattatttgagattttttttttttttttttgtgtgattgttttattagtgagttttatatttgtgtatgtttttatggtgataatgtggaaatgttgaaaatgtcgttttaattttaggtttaggatttttttgagtattttttgtaggttttgtttagtggtaatgaagttttttagtatttgtttgttttggaaagataatttttttttttaattatgaagaatatttatgttttgtttattatttttggtttggtagttttttttttttaggattttgattatattattttatttttttttggtttgtaagatttttgttaagaaatttgttgttagagttgggtatagtggtttatatttgtaattttagtattttgggaggttgaggtgggtggattatgatgttaagagattgagattattttggttaatttggtgaaatttcgtttttattaaaaatataaaaaaaaaaaaaattagttgtgtgtggtggcgtgtgtttgttattttagttatttggtaggttgagggaggagaattatttgaatttaggaggtagaggttgtagtgaatcgagattatgttattgtattttagtttgggtagtatagcgagatttcgttttaaaaaaaaaagaaagaaaaaagaaaaagaaatttgttgttagtttgatggggttttttttataggtgattaaatattttttttttgttatttttaggatttgcgttttattttatattatagaaagtttgattatatgttatggtgaggaattttttgtattgtattttttttagaattattgaatattttgtatttgaatgtttaaattatttgttagagttgggaattatttatttatttttttattaaataggttttttaatttgttttttgtttttttgtttttgaggatattaataatttgaatatttggttgtttatattgtattaaatgttataaaggttttgtttattttttttttgtgtgtgtttttgttttattgaattattttattatgtatatttttaagttttggaatttttttttttgtttgatttagtatgttgttgaagtttttaaatgtatttggaattttatgttatgaattttttaattttagaatttttgttttttttaaatttatattttttgtaaattttttatttgtattttgaattatttttatgttttttttgtattttttttagaatttttttgtattttattgaatttttgtaaaatgaatgttttgagttttttatttagaattttgaaaatttttttttgattaagatttattgttttttttagcggtttttttttttttttttgtttttttatgtttttgtgttttaacgttaatatttttgtatttgatataatagttagttttttttatttttgaattttgttttatagtggagagtatttttttgaagatgagtttatggtgttggttgtatagggtattttggatttgattttgggtgtagtatatagtagagtattatggtttttgtataatttttttggttgtagatagtgttaatagtatttgtgattttttttgtgtattagggtgtggttattagtgaggttgtggtgaaaatgtgttggggattgagatgttatatgagatagtttttaggttttagtggtggtagtggtgtgttgagtgtttttatttttgtgttttaaggtggtatatattggtatttgtgttggtggttattggtgggttgatttttgggtttttaggtggtttgtttggatggtagtagtggtagtggttgattgggtaggtgttggggatttcggtttttgggtagttagtttggtagtggtagtggtgggttgtttttttgggttttaagtagtgtgtattgttagcggtagatgcgataggttgggtgggatgtttataggtggtgtttgtaggtaggtgatagttaaggtgattgtatttaattttaggtatttaggaggagtgtataggtgtttaaggtggtggattgggttgaggaatttttaggttttggggttgtgttttttgttttagtgggagggggcgatgaagttgtttttttattattaaatgttgtgttaattagttttttaattttttttttgtttagaggattgaaatatttattatagtttaggtttgttggttatttttttattttttgtatgtttaaaatttatttgtttgtttgtttgtttgtttgtttgtttgtttatttttgagatagagttttattttattgtttaggttggagtgtaatggtgtgatattggtttattgtaattttcgttttttatgtttaagtgatttttttgttttagttttttgagtagttgggaattataggagtatgttattatgtttagttaatgtttgtatttttagtagagacgaggttttattatgttggttaggttggttttgatttttgatttcgtgatttatttatttcggttttttaaagtgttgggatgataggtatgagttattatgtttggtttaaaatttttttattttttgatagatatatttaaggtgtgttagtttaatttaattattatatagggtatatatatattaatatattaaataatattttataaatgtattatattttgttaattaaaattatatatatatatttgaaaaaggtattattttttgggaatagaatttagttttatagtattttttttttaggattttaaagatgttgtttatttgtttttttatttgtattgtttttaatgaaataattgttgttatttttattattatttttatttttttattttttgtttttttaattttttttttttttgtggtttttaataaatacgtgttttttttttttatttagaattatagagtgaacgtgagaaataatttttagggagggttttttgattattgtttgtaaatttttagaaatagttgtttgttttttgttttattagattataggttaatttttttagagtatttttatattgaagaatgttataattaattttattgattatttttaaaattataaaaattttagaagaaaatttaggtaatattttttaggttataggtatgggtaaggattttatgattaaaatattaaaagtaatgatattaaaaattaaaattgataaatgggatttaattaaattaaagagtttttgtattgtaaaagaaattattattagagtgaataggtaatttataaaatgggagaaaatatttataatttatttatttaataaagggttaatatttagaatttataaggaatttaaataaatttataagaaaaaattaaataattttattaaaaagtgggtaaaagatatgaatagatatttttttaaagaagatatttatgtagttaatagatatatgaaaaaatgtttattattattggttattagagaaatgtaaattaaaattataatgagattttattttatattagtaagaatggcgattattaaaaagttaggaaataataagtgttggagaggatgtggagaaataggaatatttttatattgttggtgggattgtaaattagtttaattattgtggaagatagtgtggtaattttttaaggatttagaattagaaatattatttgatttagtggttttattattttgtatatatttaaaggattataaatcgtgttgttataaagatatatgtatatgtatgtttattgtggtagtatttataatagtaaagatttggaattaatttaaatgtttattaatgatagataggattgagaaaatgtggtatatatatattatggaatattatgtagttataaagaaggatgagtttatgttttttgtagggatatggatgaagttggaaattattattttgagtaaattattataaggatagaaaattaaatatcgtatgtttttatttataggtgggaattgaataatgagaatatttggatataggggggaatattatatatcggggtttgtcgtggggtgggggtagtggggagggatagtattaggaaatatatttaatgtaaataatgagttaataggtgtagtatattaatatggtatatgtatatatatgtaataaatttgtacgttgtatatatgtattttagaatttaaggtataataataaaaaaaaatttattggttattttggttaaagtatcgtgtttggataagtggttaagtattattttggatgatttgtgaggatgtttgttggatgagattaatatataaatagttagattatgaataaagtagattaatgtttataatgtgagtgggttttatttaatttattgaaggtgtaaattaaataaaatattgattttttttgagtaagatggaattttgtagtagatagcgttgggatttgaattgtagtattagttaattgatttattaatagttggttggtttgtgtatagtatttgtaagatgaatggataatatattgtttggaagtttatttttttgattaaagaaggtaaaaatagaaaagttgttgtggatttaattgtatggtgtttttttagtagtggtggaagaattgaataatgataaagtttttacgttttagtttttattgatttatagggagtgattaatggtttggtcgtataattaattaggagagtaatgaaaaatttgtttatgaaaagaatgtttatgtgagttaagttttacggaaattattatggtaatttgaggtgtttattaatgtaagatttgttgatatttgatatagattggatgttgtttttgtgtagattttatgtcgagatgtgatttttagtattataggtggggtttggagggaaggaggtggttggattacgaggttagttttttatgaattttttagtatcgtttttttagtgttgtttagtgttttttagaataatttttttttaggtttggaaggtgattgaaattaataagaatttatttttaagtgtttgttaggtgtatttgtaattttagttatgagagcggttgaggtagaaggatattttgagtttaggagttagagtttagtttgagtaatatttgaggttaattagggaaatatattaagattatattttaaaaataataataaaaaaaaatttaggtttgtttgtggggattatttgagtttatgaaataagtagatattggggttgtagtaatgtagagataggtggaattaagatatagtttttttgtattttatatattataggtataaaatatatataagaagttttttttttaataaaaaaaagagagatagtatatggttatgtggcggatttttttatgggagggttttgaaaatatatagttggtaagttaaattgatattagtagttttaggaagtagtaaatgggttttggtaggaatagatttttattttggagtggtttttgtttagttggtggtaggtgtgttattaaattgaattggggtttatttatttggggtagtaaaagtaaatatttatattgagattgtagtgggataaaggagggtatttatgtgtaggacgttaaataaggagaattaggtagtttacgtttaagatttaatttttttgatggtttataagtaagaatttttaaaggtaggggtaaatttcgggaaagtagagttataggtaatattataaattaatgtatataagttatattgttttggttttaaaaggtagaatattttgatgagggagtttataggttttaggtagatttaaagattttttgatttgtgatagataaggaagtaaagtttttttatatagtttttttatatagttgggggtagtagagaggaatgtttaggtttgttttatgggtttgtttttttttaggttttttaggaagaaatttagaataaagaacggcggttagagtttaagtttttagttttttttttataaggtttttttgttagtggatttattaggagggaatttatgtttttgaaaaataatttagggataatatgttaaagatgttatttttagtttttatagagaatttaatattttgtgattttaatttttttggttattgttttaagttattatttttttttgtttataagttatagatttattttttagggttggttaggtgtttggaattttttttgaaggaattgagtttttttttatttttagatcgggaggtttcggtaggtttttaaaagagtttttgttttattttagatgtaaatgttcgagtgttataaaagaatttgaatgggaggtattgtaattatgtggattatcgagttatatttttttatattagaaaatgtatttgtttaaaatgtttaataatggttatagagagatattttttttagaggaagagttttatagagaattaaaatagttaattgggtgtgtaaaggaaagagtggggaaataagtataaagggtgggtttatatatttttatgagtgtgtttatatttgatatgagagtatttttttttttttttggtggattaggggaaggtgttgggtatgattttatatatatttttttttaaggtgggaggatattggaatgatgattgtaatttattttaatttgttttttttatatttgatgtagtggttttaggattagggatgtaaatagagtttagaaataggaattatttttgagtaagaaattgtaaatatattttatgtttattatgtaataatttttaagggtttgtagaggtaggttgtgtttttattgtatttggtaaagttggggttaatattgaatgtagttatattgtttgggattagatagttaattagttttttatttgtataattttattttttatgaattggaatggatgacgggagatatttgttagaatagtattggtttttgtagttttagttagtatagtagtagaagttagtgttttttttaaaattataaatgtttagtataaatgaagggaaggagaaatagtagttgagggtaaatgaatgaataaatgggttatgtaatgaggaaaatttaatgttatatgaattatttgaaaaaggtataagtaagagatgatattgttttttagtttagttttatttagatgtttgaaagggtgtagttatatgttgttgaaattatttttgtttatggattgtattgggattattgttaatgattaaagaggattttggtaatgtgttaggatttttttattgttatgatttttttggtgtaggagatttgtgattggttaggtatagtggtttatatttataattttattagtttgggaggtaatggtaggaatattgtttaagtttaggagtttgagattagattgggtagaatagtgagatttatttttataaaatatttaaaaattagttgggtatgttggtgtgtatttgtaatgttatttatttaggaggttgaggtagaaggattatttgagtttaggaattcgaggttggagtgagttatgattgtgttattgtattttattttgggtaatagagtaagagattatttttaaaataaaataataaatattataaaaagagataatgtggttaaaattagggtgtgatttgtggtttagtaaaaatatttggttttttttttgttttttgataattaggttttaaaatatttgtaatttttttagtgataaatatgattttaatatggtaatgagatgattatggggtgaggggtttttagatagttttaggatgggggttggttgttagaaatatgaagttgtgattagaggattggaattgttagttttatttttaaagtttgggaaggaaagagaggtttgaggttgagtttagttatatagtggtcggtgatttaattaattatgtttatagaatgaaatttttatagaaatttttggagattgggtttcggagagttttttaattgttgagtatattcgtgtgtttacgtgttgggaggatggtgaattttattttcgtggggatagaggtttttgtgtttagagtttttttaggttttattttgtgtatttttttatttggttgtttatttgtattttttataattgttatggtttgaatgtttttttaaaaaagtatttgttggatattttattttaaatgtaatatttttaagaaatgggatttttgagaggtgattggattattagagttttgtttttatttatggattaaggtttattataaaaggatttgaagttgtgagtttgattttttttttttttattttttatttttttttgtttttttgttttttattagatagagttttttgatttgggaatttttattttcgatattatgaacgaaataaatttttgtttgttataagttatttagttttaggagttttgttttagtggtataatttaaattaggggtttttaattttcgggttgcggattggtataggtttttggtttggtgggaattagatcgtatagtaggaggtgatcgttgggtgagagagtttgagtatgatattagagtttcgttttttgttagattagtggtagaattagatttttatagaagtatgaattttattgtgaattttgtatgcgagagatttaggttgtatgttttttatgaagttttaacgtttgattattttaggtataatagttttattcgaaattatttttttttgttttttattatttttattaatttatggaaaaattgtcgtttatgaaatcggttttaggtgttaaaaaggtggggatttaagttataataatgaaaaattgtaatattgagtgtgaaaggaaaataaaattttaggattttaaatttattatattaaagggaaaaattaagtttggagattgatggaaaaattgttttttttttgtttttaaataaataattgtaaagatagaagattatatatttttttaggtggttttttttataaattgtttataagataattttttgtgggttttaacgtgtttattttaaaatagttttgttgaatttttttttgataatgtaaattaatagtttatttttataggtataggataaagataagattagtaattatttttttatttatttagagttaaacgtatatttgatttttttatttaacgtttattttattttatttaaaatgtagatttattgagtatgagatgaatgtatagttgattatttttttttttttttggttgtttttttttttgtatatattgaagtttttaaaagtttgttaggaaagagtatgggttatagatgttataatgatttgagtttttgtttttaaggtgtatttttagtttggtaaaataaatttttaaattgattgagatttgttttagatatttttcggtttatacggttatagtaattttttgagttttttgagttagtttaagaatttttaatttttgggaggtgagaaatttttgattttatagttatgttagatagaagtgtaggtaatttgggattcgatatttgtgatttgtttttgaagtgaggatagatttgtaggaatgagttggtaaatttgtagagtttgaggcgaattttaggtagttagtgttagaattgagttaaattttaggatttttagttgttgttggagaattagaaagttatttgggtggaagaaaattttattattattttatagagagaaatttatagtaagagtaagtaagtaaatttttatttttttcggttttagaggaaaagataaataaatgtaattatttgttttatgtttttaaatataggttgttattagttgtttattgtttagacgtggagtggttttatttttaatttagaagttaggattttttaggtttttgagggtgttatataaaaattaataaatgttagagattttttttttagagatatttttatatataagaaaatataaatattaatataaaatatcgtgtggatttagaatttttgatattttataaatttgggagttttaattttagtaagagttatgttgagggaagatgtttgaataattattttattattatagaatgttattttaataatttagattataaattgggatagataaaaatttgatgtaaatttatttttaagggaatgggtggaaatatgttatttattagttattggtttatttagttatttttcgtgtttattgggtattagataaagttttcgttttggattattgttttaagaattaaaatttgttatttttttttattttttatattttagtatttgaatttttttattatattagaattttatattgttaatgaaaagagttaaacgtagtaatatatttaaagagatttattttgagttaaaaatgagtgattatagtttatgatatagtttttaggagatcgagaatatgtgtttaaggtggttgaggtataggttggttttatatatttaaggaagatatgagatattaattaaatatatttaagttatatattggttcggtttagaaagttggaataatttgaagtaagtaagggttgcggggtagtgtttttgggttataagtagatttttaatttttttgattggtaattggttgagttattattaatagaaaggaatgtttgggttatgataaaaggttgtggagtttaaaatttttatgtagatgacgtttttaggtgttaggttttagagagaatagattgtaaatgtttttgattagattgaaggtttgtgttgatggtaaatgttggttaattttttttgaattttaagagggaagagggtataataagatatgtttaatatttgttttttttggtggtttgagttagttttttaggttaatttttgagtattttggttgagggtgtttattaaaatgattgggaaggggtggttttgatgtttatttttggtttataatatgtaaaatgttgagaggagatagatattatttttttttttggaagaggataataatattttagttatttttgtagttgtttatggatatgagttttaagttttattagtttgatgattatttgttgaagaggtgttattgttttaggtaaatattaagtgttcgttattttacgttaagaagattaaggatattgatatacgaggagtgagttaggattaaatggtttaataggtaaaagaaagataaagggaaatagtttttttttgtgagagagaggggtatttaaaagggaattttagtttggaatgggagtgtatcggattttataggtaggtttgaggagacggtgtttgatttatgtagggtttataggttggttgtattaggtgtgatatttatatagtgcgtgtggaaggttgtttattttatttttattttattatgtaaatgggttttttatttggtcggtgatatgttgtttgttttttattgtaaacgtgtttggtaaagagaagggaagatggagtcgttattgtgaatatatttagttttaggcgttttatttttattggatagttgttggtatttattcgtgtaaatttttagtttatttgtttgtgtttgaagtttgatattataggttgttttttgttagaaaagaaaataatttggagtttgttttttattaaaagttttgtgtatttttattatttgtttaaataatttttttttaatttttatattattgttagatttagttagaatgaggtgatagagaggttaggattgtgtagaaagtattttagtaaagatggttgagtgatagtagtgatgtttaatttttatgtgtagtagtgatatttgttttagttttagggtttagtgtttaggattagggtgttagaggtgtgagtagtggcgtttgtgtttagtagtaggggtagttgtttttaggagggatttgatttagggtgggttgtgaattttgttttcggatgtgtagtttttagtttgtttttgtagttttttttataataaaattagtttttaatattagatatacgattttatgtgtatattatagaaatgtggtttttatagttttttttaagaagtgagtgagaaattagtttgcgggtgagtgttagagagcggtatttagaggtgttttttgtgcgagagttatattttgaattgtttatttggtttttattttatggtggagagaataatagagaatattattttttataattgatgatatatatttttttttttttttttgtgagaaaaatttttttttaaatagggtttgaaaatttattttatttatttattttgggtattttttgattattgattttagtggtttttaatttgtttgagtaatgggattgttggcggggatttagaaaatatataggttattttttagaatttttgttttagagtattatgtataagattaaggaattatttatatgataagttttagaggtgaggttgatgtttagatatgtgggattttggagtttttgttattttaagtgtgatttggagattagtaatatgagttttaattttgttataaatttagaattttttgtttaattttagattttttggattttagtattatatttaggtgattttggtgtatatgggggttttttgtttgagtgttttttagacgtgggattagaattgtgtagtttgttttgggtgtggtttgattatattttttagaattggaggtttagggtttagtttttgtgtttatttttttttatagttagttattttttttgtgttttatttatgtttgaggttttaagtttgatatatatggtgtgattttttaaatttatttttttagtttagtttttttttttaaattttggagttgtttgtttaaattttattttagtttttttatttgtttttttagtagatattttttttattgagtgtttgtgatgttttttttttaggacgtttttgttagagtttttttatttttattgatagtagttttatttttttatttatttattttataattatgggtgtttttgatttattttttttatattatagatataatttattggtaaatgttgtgagtttatttttaaatgtatttagaatttttttatattttattattttttttgtttacgttttagttaaggtaatcgatatttttagtttggaatattgtatttgatttttattgtttttttttttgtttttttcgtttttcgttttttaattttgtttttagtatagtcgttagagagatttttttaaaatagaagttatattatggtttttttttgtttaaaattgttttttaattttttattttatttagagtaaaggttagatttaattttattttttttaagtttatttgttttggtcgtatttttgattttattttagtttttttttgtttagtttttttggtttttttgtttttttgggaatataaatatttttttgttatagtgtatttggattggagttttttttgtttggaaagaatttttttagatatttttatgttttttaaatttttttttaaaagttatttttgtaataaggtatatattgattatttagtataatagttattttttttgtttttattgtttatattttggattatttgttttatagtatttattattttttagtattttttttttttattttggttatagtgtatttatcgtttgtttttttttattggaatatatgttataaaaggttagagattttttttttattttagtggtgttttttagatgtagaattattttgttttatgtttggttaatgataaaggttagttgaatgaatgattattgtagagtatttttttattttgaaggtagtatttttattaatatagttttaggttaagtgttgttttgtggtagttatagtataaggattttttatattgagatagaggtcgtttatgttttttttagtagtgttgtttgtgtgttttttttttttatttttttttttatagtaatttttttttcgtattttttgttttagtatattgtagtatataattaggttttttttttaggaaagaatagtttttgatgacgggtttaattttatagataaatgtaagtttaaattagattttgttttatagatttttgagttgggattggatttagtattaagattattagaattagggtagggagagagggtagaagagtagagtagaaaaggagttttagaagtagggtaggaggtgaatggttttgaaaatttgttttagaatgtatagagattttcgtgtgtaggggtcgtttagggcgatgtgtgagtttttgtggttatagtttttattggataagtttttattgaagggataaggataatggagtagtgaaggtgatttagttgaggattaattatataaagtttatgatggatttaatattaaatgggtataggtttcgtttatattcggttttttatagttttttttatattttatttgtaatagatttagtatagcgaatatgtagattttggaaggtttttaggtttttatttgtttttttaaattttaggaattgatttatttaattaatttattaattttttatagtaaatatttgagaaaataaatttatatttagatttttatttttagtagggaagtaagaagttgtagtttagtgtacgtaaagttgagatagagatggagatatttagttttatttttttggaataagaaagatgattggggaggaaatataggttagtatgggaataggggttatagtggatataagggtgggttgtttttttatttttttatattatgttaatagggacgtagatatatttaggtgtttttgtagaaagagatgttagaggtttttgaagttataaaggggaggcgtgaagaaattttgtattttagttttttataagatagttgttttaggttatagaaaataatagttatgaataaattttggttagttatggtaagtgatgatattttaaatagtttattatatacgcgaaatattttaattaaagaatttttattatttaggtttttttttattgttttatttatttttagattcgttattttatttattttagattttaagaattttatttttttaagttgtgagagatatattagagttttgggtattgtcgttgtttggagtagaataaaaataggatttggttagagttcgtaggagacgtgggataggaggaattatggggtgggtgagtttttttatatttttatttttattatttatacgtagtttgagagtagttttttttttttttatttgtgggaagaaaatgttttgtgaggggattgggaggaagtagggttatgagattttagaggaattttttcgttttggatttaaaaggaatttttagaagtatgattatagatttaaggtaggattaggaaatacgaggaaagtaagtgtgggttttggattaattgtttttttaaggtttgtttttagtagggatttttttttgatttatgaatgttggaattaggattttaatattataattattaaggtgatatattcgttttttattgttatatgtgttgtataaaagagtaagtgttggtatatagggttttaggttgcgttagtttttgtgtggatgttgtattttagtaatgaggtagggaatatttttatttggggtttgaaatttttagtgggataagaaaatttagattttattttttattttttttttatttgagtttttttttttatatattatagtagcgattatagtttcgatgattataattgttaggatagttaggttagtaataatgtttacgatggggacggtggattgggaagacggttttgggaaaggaggggaagatgaggggttttgattttgttgaagggtttttgttttttttgagaagagatatgattttttatttttttttttattttattttagggtgaggggtttcggtagttttttatgttgtatatggtatgtgtatttttgtttttttttagaaggtattattatagttgtttatttttggaaggttttattttttgttggtttggtttttataagtttagtgttttgagtttggttttcgttatttcgttgttaggttagtgtgattttcgtagggtagaagtttagggtttagtattttagggtggttttatggttagagatggggtggtgggttacgtgtgtttttggggggtttgatgggaagagttagaaaatttaggcgttttgtattttttatggtatattttaggattatttatgtgattagtttgagaatggataggatatttggggtggggaaggggtatagaatttagatattagcggatgtaggtatttgggataattttttatttattggaaagttcgagtttttgagcggggaatagggatttttgtttttgatttgagtggaggtaaagtgatttagaagtgttggaattagagttttaaatatattgagtgtgaggtagagaataaggtttgagaggaaaagttacggtttttaaggttgttgtaggggttaaaggggatttttgattagtattttagggattgtttttttttttatttttttagagacgttattttttaattgtttagagagaagagggggtttttagaggaaatttaggaaaatttatgttattttttatttaagggagggcgatattttagcgttgattttatttttttttttttttcgtgggaggttattttcggcgatttataggagatggggaaggttttttattgtttttggtattcgcgcgttttagcgtgtttttttcgttttttaggtatttgcggagttattttacgtacgtgttttttaggtaggttttgttttgtttcgttatacgggtcgttttttatttgcgttgggtgatttgagtcgcggtgttcgtcgcggtttaggagcgtaggttttcgtttagggcgatgtaatttttgtcgtcgtaggcgtattggttatgttcgcggaggaggcgttcgttcggttttacgtcgtagtcgtatatgttttggagggtgtgagattttggtttcggtttcgcggttagtttcgttttttcgagtttcgtttcgtttcgattaattcgcggggattttggttttaattgaaaatgaaatcgggtaaacgcgtttggggttttcgtcggtcgagggtttgggcgggtttcgcggttttagggaggcggatttcggattcggagattcggggcgattcgggtcgttcgtgggggatggggagtcgtgatttgcgtttcgggtcggggttatttatcggtttcgttttggttgtagtagtcgcgtaggtttcgtaggttttttcggttagtttgtgtgttggttttgaagatttgtgtgtttcggttttaatatttcggttttttttgttttatttacggcgttcgcggtttttttttcggattcgcggcgtcgttgtcgaattttacgaattgcgtgtcgtttacgtagtttattgagatgaagcggggtttttcgcggtcgggtcgggatatggcggtgtcgaaatattttatggagtgggagtttgggggcgaggaggggttgagattcgttcgatttttttttcggcgcggttttttaggttttgcgttttcgtttgcggttttttcgtttttttcggtagaggttatttttttttcgattcgtatttatcggtttaggtttcggttagggttagggtcgtcgagagtagtaggaggacggttcggggcgttatgattagtatttcggcgtttgaggagattttgagttcgggtgggtgcgtggggattttagaattgggatttcggcgacgttgattggtttttttagatattcgatatttaatgggagtgggaagtggggatgcgttacgagtattttgggagaaggattcgatataagttgggagaagaagtgaaatttaggggagtggggaatttttaacgttgcgtttttttattgtagacgcggttttcggagtttgagattttgagagtttcgttcgggatttgggatttcgttttgatttttttttttttatattaagtttttttgttatattgtttgtttgagttttggataaggatttgtttgtggaaattagggagagatttttaggttgcgtttagtttttttttttttatttttcgttttggaatttttgtttttgaattggattttttgttttttattttttatttttttttttggatttttgtgtagggaaattgagtacggggaatttgatgttagagagtgagttcgttttgggaatggaggtgtagagataggggttttttttttaaatttggtgaagttttttttgaaggtatcgtatagggatttttatagagattagttttttttttgtttgttaatatagtaggtagtataatattggtaatttttgaatgattagaattttaatttgtaaaagatttgtgttaaaatagtattataattaaatttttaaagtttttaagttttatttttttagattgtggatttgtaattttgggttgttgtatttaaaattatttttattttttattttgagtttttttgtgtgagtttagaatattttttgaatataaagaagtagggtttgttattgtttattgtaatcgggagtttgtagttattattttaaagttgcgagtgttttatgtagttttaatgttttttatcgacgttgaagtattgtttgtttttttgaattttgtatatttaagtagtgtgcgtattttatttgaatatttggtatttttgtaatttttttttttttaattataaggagttaattagtttttaggaagtttaataaaatgtattaaatatcgaatgtaaagaattttttgttaggtttttttattgttttagattttttttttttgttttttttttttattttttgtttttttagtttttttgtttgttttttttattttttatattttcgttttttttagttttcgttattttgttatttttgaattgtggtattaatattgttttttattttttgtttatatttgttttttttatagtgtttagtagttttgttaatgtgatttaggttatgttatttttttatttgtaatggttgggttttggtttattattttgttatacgtttttaatttgttttatatttttttgtttttgttttttttttattatttttttatgtgttaaataaatattttttagtttatggttttaatttttttagtggtttttggttatatttttttatataatagtaaagaatggaaattcgattttttgattttttatagtgaagtttaggttatattaagttgtatttagtaaaataaaggatatttttaatagtgtagttttttgtaatttattattgtgttattattgttgtatatattatattaatttatattatagatttagtgatatagtgtaatattttttgttttaaataagtagttatatgtttttaggaaattaagaaaatgagtgtgaatgtgatatgtgtatgtgtattatttttgttgttaattgtttttttttgtatatttgggttattatttagtattatttttttttattttgaagtattttttttaaaattaaatgtagtataggatttttaggaaattaattttatggttttgattatttaaaaatgtttttatttttgtttttttttttttcgtttttttttttttttttgtttattagggtatttatgtgtaataaaatttattagttttagttgcgtttttttggcgaatattggtaattatttatagttatgtaattattatattgtttagtagagaaatttagaatgtaaagaattttttgttaggtttttttattgttttagagtttttttttttgttttttgtttttattttttgtttttttagtttttttttttgttttttttttttatatttttttttttttttagtttttattatttagttatttttgagttgtggtattgtagagaatcgttttttttttttaaaaattttttttttgtttttttttatttaatttttgttttttatttttattttttttttttatttaattattattttgttttttgttattgtaatattgaaatttttagaatgtaatggacgtgtagtcgtatgttatgtagtttttcgtttggttttttttttagtataacgatgtgtgagatgatgttatttatttatttttgttgttgagtagttgttgagtattgttggaattttagtttatttattggtttttttgtttttagttgatagatatgtggatttttttagttagggtttgttattaatgaagttattataaataattgtttataagtgtggttttatatttttattttttttggataaatatatatttgtggaattgttgggttatgtggtaatagatgggtaattgtataagaaattgttatattattttataaattggttattatattttttgtatttttattagtaatattagatatttttattttttttatatttttgatagtatttagatttatttaatgtttttttaattttatttattttaggtgatgtgtgatggttttttattgtggttttaatttgtatttttttgatgattagtattgtttgttgtttttttatgtttatttaagtgatttattatatatattttatgaattattttgtaagtttagtgattaattttagagatttttttagaattttttagtgttttttatatatgtaatgaagttggtgataaagatttttgttttttttttttttatttattgatttttttttttttaaaattatttttatttggtagagatgaggttttattattaggttggttttaaatttttgaatttaagtgatttttttattttaattttttaaaatgtagggattataggtatgagttattatgtttggtttttttattggttttttattttatttttttgttatgttgtattgatttggatgttttttaggtgtttaaataagaatgatgagagtttatatgtatgtttataaggaatttaaataaatttataagaaaaaaaatagttttattaaaaattggtaaagggtatgaatagatattttttagaagaaaaaatatatgaaaaaaaagtttaatattaatgattattagagaaaagtaaattaaaattataatgatgtattattttttgcgagttagaatggcgattattaaaaagtgaggaaataatagatgttggtgaggttgtggagaaataggaatgtttttttattgttggtgggaatgtaaaatagtttaattattatggaggatggtgtgattattttttagagatgtagaattagaaatattatttgatttagtaatttttttattgggtatatatttaaaggaatattaattattttattataaagatatatgtataggtatgtttattgtagtattatttttaatagtaaagatatggaattaatttatatgtttattaatgatagtttgggtaaagaaaatgtggtagatatatattatggaatattatatagttataaaaaggaatgagtttatgttttttgtagggatatggatgaagttggaagttatcgttagtaaattaatatgggaatagaaaatttaatattacgtgtttttatttttaagtgggaggtgaataatgagaatatatggatatagggaggggaataatatatattagggttttttggggagtcgggggtaagaggagggaatttagaggatgggtgaataggtgtaggaaattattatggtagattatacgtatgtaataaatttgtacgttttgtatatgtatttggaatttaaagtaaaataaaataaattaaataaaaagagaaagtgagtgatttatatgtatatatatgtttattgaagtattatttattatagtaaagatttggaattaatttaaatgtttattaatggtagattggataaagaaaatgtggtatatatatattatagaatattatatagttataaaaaagaatgagattacgttttttgtaggaatatggatggagttggaggttattattttaagtaaattaatgtaggaatagaaaattatatattatatgtttttatttataagtgggagttaaatgatgagaatatatggatttgtagaggggagtaatatatattggggtttatttgagggtggagggtgggaggagggagaggattaggaaaaatagttaatgggaattaagatttaatatttgggtgggtattaatgggtatagaaataatttgtgaaataaaattttatgatataagtttatttatataataaatttgtatatgtattttttaattaaaaataaaagttaaattaaaaaaaaaaaataaagaaagtgtatgtttggaaagagcgtatggttgggttttgtgtttttttaaattaagttatataatttttgttttttattggagtgtagatttatataggtttttgttattattgatatgataagttttacgtttattatgttattttttcggtttttgtttttttgttttttttgttttgattaatgattttttattagaaattatagaaataaaagaaagtagaataatatttttaaagtgttggaagataaaaagattaattaagaattttatatttagtatagatgttttttaaggataggtaaatgagatatgttaggtaaaaaaaaattaaaagaatttgttattagtagatttgtataattataattggtaaagaaaattttttagattagaggtaaatgatacgaggtggaaaatgagattattaaaaaagatgaagatgattaaaaatggtaaatattgagttaagtgtaaaaggttattttgttttttttatttatttttattttatatatatagaattgtttaaggataagaaaaagttttttatcgtgggatttataatttatatagatatattatatataatatttatattataaaagatggatattttatagaggataaatggttgtaatatttttatatttatgggtattagtatattattaattgaaagtagtttgtgaaatgttaagaatgagttaagttttgaaggaaattgagatattaaaaattatttaaaagattgataagtttcggagatggttttttgaaaataaattttagttagttttgagttttattattttacgattttagaattatcgtgaatataaaagtaattaaagaatagttttgtttagaaagaggagttatttttaaatatggtgtttttgggatagttggttttttttgttggattttttttatatggatgttttttgtagtgattttgttgttttgtttttttattttatttagtgttttgatttaagagaaaaggggtgtttgttgttgtgtttatatttggagaaggaaattttgaaggtgttagtatattataagttgggtatgatagtttatttttgtaattttagtaatttaggacgttaaggtaagaggattgtttgagattaggagttggagattagtttgaataatattgtgagaatttcgtttttaaaagatataaaaataagtaaatttagttgggtacggtggtgggtatttgtatttttaggtattggggaggttgagatgggaagattttttgggtttatggatttaagtttgtagtgagttgtgatcgtattattggattttagtttagattatagagtgggattttgatttaaaaaataataataataataaatattgtaaatttttgtttattatgggttattttatttattatttatttagtgtgtattttgattttattttattggtagtataataaattaggatttgttgaaattaaaaattatatttattttttagtgttaaaaagtttagtttaggtaggtgagaaggagatagtttttattagcgttgaggatttagggagaatgagatgggttgggtaggaaggtttttttgtttgtttgtttgtttgtttgttttttatgaataagtgtaattttttattatgatagagttgtttttattaaaggaatatatgaaaatggttaagtaaaattaaatggttttaaaagttttataatgaaaataatagttttgttagttgttttttcgagaggtaagtattttttatttttttagtttttttttttggtagttatttttatgggtttttttaaattattatttttttagttttttaagtgggtgtatatattaatatatgtaattttaaaaagtttttttagtttataatgtattttaatagttttttgttttattttttttaattttttagagtaatgatttttaatttttttagtaatgttttttattttttttttatataattatttagttattttttgattattttatatattttatagtaattttttgatatgatagatgaggatttagtttttatattattattatttttatttttttttttatattgttttaaagtagttattagatttaggggttaagtagttattatattattatgagtatgtatatattgtttattgttgagaaaaatagagtattatgtttttgttttttgttttgtgtttttttttgttttagaattaatgattgtttaattattttttttttttgttttttttttttaatttttgttttatttttaatgaattattttttaaatgttttaaatttggtaataatttattattatttttaagagaaggtaattttattatggtggttaggttggtttggaaattttgggtttaagttaattttttgtttagttttttgagtagttggaattataggtatgggttattttatttagttaatttattaatatttttattgtttttttttaaagttagttttatagttggaatattttttgtgttggattttatttgttggatttatgttattttttggtttgtttatttttttattttgttggagtattttttttaatagttttttaataaaagatatatggaggtaaattttgagtttttgtttgtttaaaaatgtattattttatttttatttttgattatttggttgaatatagatttattcgttgaaaataattttttttttggaattttgaaggtatggttttattgtttttagtttttttttcgagataaggttttttttgttatttaggttggagtgtagtggtataattataatttattgtagtttcgaattcgtaggtttaattgatttttttattttaattttttgagtagatgggattataggtgtgtattataatgtttagttaatttttgtattttttgtagagatggggttttattatgttgtttaagttgattttaaggtatttgtttgtttttgttttttaaaatgttgagttattgtattataggtatgagttattgtgtttggttagttttttttttattttttttttatttttttttttttttaaaggtattttaaatttagtgggtttaaatttagggtaaattttattagaatattttgttatttttgattttaaaatatattttaaattatagttttttattatatgtaattttttggtttaaattattattattttttatttgaatttagaattggtttttttgtttttgtatttttttaaaatataaaatattttaaataaattatgtatggttttatattttttattatataaaaagaataaagatttggggtggtttaagtttgtaattttagtattttgggaggtcgaggcgggcggattattttaggttaggagttcgagattagtttgattaatattgtgaaatttcgtttttattaaaaatataaaattagtcgggtatcgtggtacgtgtttgtagttttagttatatgggagtttgaggtaggagaattatttgaatttgggaagttagaggttgtagtgagttgaagttgtgttattgtatttcgttagggtaataagagcgaaattttgttaaaaaaaaaaaaaagatatgaagagtttatatatttaaatatgaaattgttttaagtgtttgttatttatcgtttatatgtatgttagtagttttttattgtaaatatttgggatttgttatagagtagttggagtatattttgtttatatataggatagggagttgataattaaggagtgggggattaatatgttagttttttttttttcgtttttttgtattttagtagtatggagtttgttattagtgagaatttgtttattgattttaaattggtttttttatttttttagttttattttttcgtattttaattgatgatttttgataagatttagaaaataaattgtttttattgaaattgtagttttggaatttgttttgggttttttaaaagatagaaatatatttatttttttattattggatttttaggttgtttttaattttttattgttataaataaggttgtaatatttgcgtgtaaatttttgggtatatacgtaaggagttttcggtattttttattagtgaaattttttagttggagggtatgtgtatttttatttttaagaaatattattaatatttgaaaagttcgataatgttaaggattggtaagagttttatatgcgatgggtgtggaatggtagtttattgtagtaggtgttggggatttagttagggttttggagaggtatttaattatagtaagaatattttataagcggtatttgatatagttaagattagtggggagtaaaaatatgttgtttagaaataattatttaaagatttaaagttaataaaagtttttttttttaatgtaaaaatataaattttttttttagagggagggggaataatttaaaataaattagaaaatatttttatattaattattttttttatatatttgaaatttgtatttaatatattcgagagaacgtttggatattttggtagaattttatatttttttaaattaatttttggaaaaaacgtgttatttttaaagttttgtatgatttttgttataaatagtttaagatggtttgggcgatttatggtttttttataaatagaattgttattaattatttaaattatgtttattttatttgttaattttggttgttaagtaagttttaagattttatttagatttttggtaagaaaatgagttcgttgtggaggttttttgagttttttgttgagaattaaattaattttattttttgaaggtcgattttttttaggaatggagaattaggtttttttatataaaattattagattttgtttattttttattgaagagattgtgttattttttggaaatatttaaatttatttttgagcggcggttagggtaggttttcgtttttgtcgatgtttatgttttgagatatagcgacgatgtagtttagtaaacgaattatgatagtagcggtgagtttttttaagttcgttcgttatattaggacgcgcggttaagattggtcggaaggtttttatttggaaattggaggatgagttatgatatttttttttttattttaaagttcgttttgggtatttattttttgggagtagaagtagcgtagtagcgttatttggtggtcgatgcgttttttttgtagattacgtatagttttgagatttattttttttttttacgtattacgtatttttttattggatattagtttgcgttaatttttttgtaaagtaaaagaagcgtgaggttggtgggggaggaatggtgttatttttatttttggcgagatttatgttatcgtgtttaggggaagggttaggttttattttttatgtagagaggaggttttggtcgtgaaggcgtttgtggagaggtgaggattcgttttttttatattgatggttaagagtttgtagatggcggggaaggtttttttttagttgtgttttattaggtttttttaggagtttaggagtagatttgtatattgtttttggtgatgtgagttgtatgtatatttagaagtgaggttattttttttgggggttttggggttgttggttgttttgggtgtttagagggaagacggggagggcgtttcgtgtaaaatagtaattatattttataaattatttttttattagtttttgtgttataaaataaaatttaggattttaaaaggaaaaaaagaaggtttaaaatttgtgttttttaataaatagtaaatatttattaattattaaggatagacgtttgcggagtaaattagaagttttattatttgttttagtttagtaataaattttttttttttttaaataaaaatatattttgattttttcgattataatttttttgttttattttatatttttattatttaaaattatgatttagttttatttttagaaatatgtttttgtttttttttattttatagatttttttttgaaatttatattgtgtggtagagttttttatagtgtgtattttgttgattgttttttaagttattgtttgaatatgtgtttttattatttgtattgtttttaaattggtaattggttatggaggttagtttttatttaggtttgattttttttttatttgtatttgtttgatggtgttgtattgtgtttttttattaagaggaagaattttatattggttttttttattgtgttgttaatcgttattgttgtttaatggttaaatttgttaatttttgatgggttgtaaaatagttattatagttttagttttttattttttttttatttattatttgaataatttttaagtaagagatttatttttttgtattgtttgtttattattagaaatttgttttttgagagattaagttaagtatttatttatttatgatttagtaatagtagttttagttattaattaatagaaatgtatgtatgtgtgtgttaaaatatatgaaaatattatttatagtattacgatttgtaaaatttggatataatataattgtttattaatagcgaagggataagaaatgtgagttatttataaagtggagtattggatagttatgggagtgaataggttatgattatatatagtaggatgatgagatttaggggtatgatggtgattgtataatgttatttaattggaattggtagaatttatttgtgttagaaattaggagtggttattttagggttggggagggtggtttgtgattgagtaagatttagtgatgtttttgggaggttgtgattggtgtattttgatgtgggtgttgtttatttgagtgtttattatgtgaaattttattgtttatttgtggattgtttttttttttttacgtatgttgttttttatttaaatatattttgttgatgttttgaagtaattttatttacgttaagaagaattatttttattgtatatttttggaaatgttggattgaaaaaattagtgtaattgtttttaattttaggaaataaatatatataaagaggaaaatttataataagagtagtaggtttgggagttgatattagaatagttttggaaatggttttcgagttaggaattggggattaaatttaaataaatttataggaggtggggggtgtgaaatgatgtttaatagtgtatgaatgaacgagttatgagtagtggtttatggtttggttggttagttataaatttgaggaaaatagagttggaaaattgggaggtagaggagagaggtacgtatagattttttgttataggtcgagtgtgtgataatagtggttgtgtgtggatgtttattagagggtttttaaggggatggggttttttgtaattaggtgggtgagatggtttgatggacgatgttatttagttatataggttttgtttatggagtttttgtataaagtggtcgtggtggttgcgatggatattgtaagggtatagtaattgcgtcgttatttattaaggttgatttggtagttgttattgttgagggtttagtttattaaaagtagttgtttttttgacggagaaataaaataggtaatggtaattaagaataaaataatattatgatagataaatatgttattaaagatatagtagaggtttaaataattttgagattatgaataagattatggtaatggggagaatttattataagtaaagaagttaaaatagttgtaaaattttagattgttttatatataagttttattaaaattttgaagaaggttattgaatttatacgtaatatttaagagaatgaggaaatatagagaaagttagtaaatttattattgtttatgtataaataatattgattttaaagttagttagggaatatataagagaaaagtatgataagataattatttttaagtaattagaggtaaaaatattgagaaaaatagtattagattgtgtttattagtgaattataaaaaaattaaatattttgtttaggttatttatttttagaatataagaatatttaaattttaaatttgtaatgtattttattatttaattaaagaataaaagatagagataatgatgttttattagatgtagaaattattgtagatgaaatttaatattttattttatttacgtttttttagttatttttatttttaagaatttgtgattagtattcgttttggtagtatatatattaaaataggaatgatatagagaagattagtacggtttttgtataagggtgatatgtaaatttatgaagtattttatatttttaaatttttaataaattaggtattgaaggaatatattttaaaataataaaagttatttatgataaatttataattagtattatattgaatgcgtaaaagttggaagtatttttttttaatattagtataaggtaaggatgtttttttttattatttttgtttaatatagtattggaagttttggttaggataattaggtaagagaaagaaaggatatttaaataggaagagaggaagttaaattgtttttgtttgtaagtgatatgattttatatttagaaaattttattgtttcggttgaaaagttttttaagttgaaaagtaattttagttaagttttaggatataaaattagtgtgtagaagttataagtatttttatatattaataatagataagtagagagttaaatcgtgaataaatttttatttataattgttataaatagaataagatgtttaggaatatagtttataagggaattgaaggatttttttaaggagaattataaatcgttttttaagtaatttagagaggatatagataaatggaaaaatattttatgtttagggatagaaagaattaatattgtgaaaatggttatattgtttaaagtaatttatagatttaatgttatttttatttaattattattgatattttttatagaattagaagaaattattttaaaatttatatagatgattgatattaaaggtaaaattaaaattaatatataaaataaaatttaaaatttttaagttatttggagtttgttttgagttaatgagattaagtttatgtttttaagaaaaatgttttattttgtcgtttttaagtgtgtttttatggaaagagtttgagaattattgatatggattatagaaaattaggttttatttaaaaataaatgtatttaattttaaaaatagttttatttaaaatgtttattgttgtagataagaaattttatttgaaaaattagaaattggatatgttagtgattataggtttttttttttaaatttgaatatgaaaaagttttttttagttttaagataatttattatgttatttaagttagtttaaaattttaaaaagttattatataataaggtaggggttgaaaaaagaaatattttagatttagagaattgtttttttttagtattaattaaaatatttaaaaaattatatttaatgatgttattttaaattggtttagtaatattaaatgaggaatttatgttttagtaaatagtggatgaatgtgtttatggagagtattgttttaaaatgttttaataaatatattattgaagtttttgttattttatttaattttagttattattttttttagttgatttttttgttaattttaaatttttaaaagaaagattgtttttaaattattttatatttaatgaataaagttatatattattgattatttaaattgaaaaaaaattaaaataaaaataaaatttatatagaattaaaaagaatttgtatagttaagataattttaagtagaaagaataaagttggaggtattatgttatttgattttaaattatattataaggttatagtaattaaaatagtatggtattgatataaaaatagatatatagattaatggaatagaatagagaatttagaaataagattatatatttataattatgagattttagtgattatatataataaagaatatagtttatataaaaatagtttagaaaatgtaatttttatagttattatattataatattgaaaatgtttagtttttaattttaaaaaatatgagttatgtatgtatgaaagtatgatttatttataggaaaagtaatagaaagaaattgtttttgaagaataatggattgatttattagataaagattttgaattaattgttttaaatatagttaaagagttaaaggaaattatggataaataattaaagaaaattaggaagattatgttttattaaatagtagaaattaataaataattgtgaaaaggaagtaaatggaaatttggagttgaaatgtatgggaagtaaaatggaaaattgattggagggttttaagagtagattttagtttgtagaatgaagaattagtaaacgtaaatataggttaattgaaattgtttatttgaggagtagaagggaaaaagtatgaagaaaaaagaataaaagagatttaagagataatattaagtatatgtattttgggagtttttaaaagagagaaggaagaaggggggagaaagagtatttgaagaaataatgattttaaattttcgaaatttttttgaaaatatgaatttgggtatttaaaatatttaaatatttaaagtagtagtaatttaaagatgtttatattgatagatattatattgaaattgttgaaagttaaagataaatagagtattttgaaaataataagagaagggatttattgagtgtaaggattttttatgagattaattgttaagtgttttttagaaattatggagtttagaagatattggtatgataaatttaaagtttagaaagaaaaaaaaaatttgttttaattgatagttgtatatttggtaaaattttttatgagaaataatggagaaatttagatatgtataggtaaataaaagttgatggtattcgtgtttggtaaatttattttataattaatgttaaaaggagtgttttatattgaaataaaaggatattagatggtaatttgaagttatatgaagtaaagaagtatatagttaaaagtaattttataggtaaatagaaaagtaagtattttttggggggtggtaatttgtaattttttttttgttttttttatttaatttaaaagaaaatgtttattaattaatgagtggataaataatatgtaatttattttgtaatggaatattatttgattataaaaggaataatgtattgatatatgttataatttggatgaattttgaaaatatgttaaatgaaagaagttagttataaaaggttatatattgtatgattttattttaataaaatatttagaagaagaaaatttagagagatagaaattgggttaatggtgttaggggttggtggtaggggagagtggaaggtgattgtttaacgggtatagagtttttttttagggtggtgaaaatgttttggaatttgatagtgatgatggttgtataacgttgtgtatttattaaatgttattgttttgtatatttaaatggttataatggtaaattttgtgtttacgtgtattttattataattaaaaagaggttggtaaatatattttaagtttgtttgggaatttgtttatttgttttttttttttaggattttattttttatttagagtttatttttgtttttttgtaagtagaaagtttttttttatgtagggattagttttatagggtcggtgggtttttttttgtgtgcggtgatgagagagtgtagaaataaagatataagataaagagataaaagaaaagatagttgggttaggggattattattataaacgtacggagattaatagtggtttcgaatgtttggttgttttgttatttattggatataaagtaaaaggggtagggtaaagagtgtgagttatttttagtgataggtaaggttatatgggttatgtgtttattggatagggggtttttttttgtttggtagttaaggtagagagagagaggagataaagagaaagatagtttacgttattatttttgtatattagagatttttagtatttttattaattgattattgttatttagaaggtagagttaggtgtataggatggaatatgaaggtagattaggagtatgattattgaagtatagtattatagggagacggttaggttttcggatagttgcgggtaagtttgattgatgttaggttttttataagaggtggaggagtagagttttttttaaattttaagtgtgttaagtagtgggtgtttttttttgatattttttattattattagattatggtttgtttggtaacgggcgtttttttagacgttggcgttatcgttagattaaggagttttttggtggttttgttcgggtataatagaaggttcgtatttttgttttttggttataatttattatgtttttttattttttatcgttgtatagtttggttttttttaggttatgattatagagtgaggattattataatattggaataaagagtaattgttattaattaatgattaatgatatttatatataattatatttaagttttatatttggtataattatttttgttttatattttattatattggaatagttcgtgtttttagttttttgtttcggtatttgggtggtttgtcgtttatatttttagaatacggtttaagattagttaggtttaaattttaaaatgattttttgttttgtttttaaatgtttagatgtaattttggggttaattttaggggaagttaggagattatttaaataagatggtttattgggagaaagaatgtttggttttaatgttagggaagttatgtttgtatttttaaaaaggattttgtttattagtgaatatatggtttttgtttgtgtaggatggagtttttagtagaggaatgaaagatagttttaggaatatgatatattttatgggtagttgattgatttatttatttattatttttagttgaaggaagtagttagattgtattttttatttattttttagttgtattttattggacgtggattttttataagtgtggatatttttggattttagttgttttttttgttgttgaggagtttttattggtgtggtttatgtttagatgggttttgtaggaggtttagtgttttttagtttttaaggttaatatttagtgaatttagattaagttttaaagtatataggggtttagatttttatttatgaaatggaagaatttattttttttttttaggtgttgtggtaattatatatatatatgtagatatatatatttatatatgaatatatatatgataattcgtaatttatatattgatggtgtttttagtgttgtttttattgtttagttgaattttataattaaaaattggattatggattgtgaaggaagaatttattttttttttttggtggagtattcggtagatatttttgttttttgggtttaaatgagaaagtagttttagtttgagggagaaagaagattatgattattattagtattataatagagataaggttttgttatgttgtttaggttggagtgtagtgattatttatagttgtgattatagtggattacgtttttgaatttttgggttttagtaatgttttagtttcggttttttgagtagttgggattataggtgtatgttattatgtttggttttattttattgttattttattttaaatgttttattttaaatgttaaaatatatgtttttatatttaaaagtgaaattttatttgattatagaagacgttaaaatgtatagatagttagaaatattatttaggtttttttttaaaaaattattgttattatattgttgaatttttgtagattgtagtgtaaatggtggtttttggagttgttttgtgtagtggtgttgatttttatttcgttattttttatgtatgtatttttatatatgttgttattttataaagttgtatttatatgttaagggttattttggatgttgtttttggaatgtattattatataagtagttttttatgttataagttttgtataaagtttatatatttttataagttatattttattttagataagaagatgtaatttaatttttttttttggattcgtttgtttttatttcgttttgttgtaaataatgttttgataagtatttttatatagaaagatttttttatgtttggaattttagaaaatttatagaatatttaagtgataaatattaggatatagatttttaaatatttttaattatttttattatattgttatattggttttttaaatcgttatattgatatattttattttattttttaggatatgttaggatttaaggttatttacgtatttggaattatagaggggtgttgggggtgaatgttgagtggaattatagggttttgagggtaatttttttagagaagattattattttttcgttagggaaagttggattaatttcgttaaatgtggttgaatgaaattggtaaataatttttagaggaatttaggagtttagtgtttttagttttattaggatttgtttagatgtttttattttgatttttagtatcgcgtttatttttaattaatgtttttatttaaataatagatattttttaagtttgggatttgttttgtgttgtaatttagttacgtatagaatgagacgttgcgtttattttttagaaattttagttttgtagttataggagattaggattttatttaaaggaaatatagaaatttttaggtgatttatgtgatttatgagttggaagtttgtagttttgagtttatttttttttttttttattttgtttagtataattggtaaaaattaattaattattttataatagttagtttaataaagttttttaaggttttaaatatatagttatttagattttataagtatttgattaggtttatttaatggtgatattttgagtatttatattttttgtattaatggaaatagagttatttgtgtttttaaatttaaatagattagagaaataatttaagaaattttttattattattaaatttagtgtatttatttttaaaattttgttttagtgtttttatgttttagtaagttaggttgggtatggtttgaggtttggtgggttaaggatagttggtttagttggggtgtattatgtattggtgggttagtagtttagaatggtgttggatttatgggtattaagtttattcgggagttgtatatattgagtcgggttttagtggtttttaggtttttaaggggtattttttttttgttagtgttaagttaagttgtggggagtagtatgtttttgtatgttgtttgataaattgtagttttagtttttgttatagatattttggtttgtattttagtgttttgtatggttgtggttatttagtcgttatttttgattttttaggattgggagtagtttgtttgggggagattattaggatgtttatggaaggttgttttatgttataagggtagagttaagtttttggtatagagattggttggtaaagttgaaaatgttgttttaggtttttttggggattatttattagtttttggtttgagtgttgtttggtaggatttaggttttgggagttgatttttttttatttaaggtttgttgtagtttttcgttgaggttttgaaattattaggagtagttgttttttggttttcgggatatcgtagggttgagttgttttttgtttggaggtggttttatggggtttattgtttgggttaagaatggtgtagagttggtgtttttaaaatgtattttggtggagttttagtagttgtaggtgttgattgttttttacgaggatttgggggtttgtagttgtagcgatttatttagtatgagcggtgttatttagtgtgtatatgatagatgttttatttttaggagatgataaagacgtggaggataaggttgaagatataagtgtataattttttatttattttatttggtatattagaaatttgttttcggtttatgtataaatttatttttgggtggttaaaggttttagtttattatagaggttatgtgtattttgtgtaattaatatattttagtttttttttatttttagttattttattgtatttgatatgatgttagtagattgttttagtttaaattttagttttattatttattgttgtgtgattttgattaagttatttaatttttttgtgttttacgagtttttattgtaaatgcgtgtgtttatatatgttaagtatttagaaagatgtttggaatatggtaatatttattatagaagtagtagttgtaattattgttttattaaaatagtggagatgttatttattagggttagagagaatttgggaaattttgatttgtttttggttttaggtggggaaatttgtaggattagtaggaatacggttgttttagtgtagttggtatagggtattgttagtttagagtaatttagagtttagaatattttggggttcgaagttcgaattgttggggtttaattgtggcgttagttatggaatgtggatttttttttagggagtttttcgggtttaaagtttttttttaattttagaaatttaaatttaatattgattttacggagaagttttgaaggttaaggaggagatacgtgaaaagtgtttggtggatattagggatgttagtgagatgggggataatggtgaggtagagtggaggggtaggtgtttttttttttagtatgttttttttaggtgttgtgaggataggtggaggttttttttaggtttttattcggttatatattagcgcgtttttaggttttttttagtttcggttatttttagttttgtagttaatttttgagttgggaaggagtttttgaatttattttgttttgtgttatagtgtcgtttattcgggtttatattgttattaggttatttggtagttaagggatggagttacgttttgtattttttgaaatatggttttatttttaagtgcggtgatgatagtgttatatagaataaatgttattgtttatttttatcgattataattttttagttttttaatttttagggagtaaggaagagtatggtttttattaaagggcgtgaggttagtagttataggggtaattaataggtaaagatttttgaaaatagatttcgtagggaagtataagtatttattgacggtgggaattttatagatttggttgtttttaagtatattagagagattgttatgaggagtaatttagttagaaagatttatttgtttttttaaaaagtataaaattatgtaatataatattttaaaaatttttattaatataaaattaatttgggcgtagtggttttcggtgagttattgggatagacggtatcgttaggaaggttggttttgtggtgttttaatttggtagagtttaggatggtggtggtttttttagaagtatttggtaatttatttgtatagggttagggttttagttttttatattttagttattatatttttttttgtttttttttttttttattattgtttttttttttttttttttttttttttttttttttttttttttttgttaaattttaaggaaaaatatatagttgttagagggtggaaggttttgtttatttatattgaaaagttcgggtatttttattagaattatatgttttattttaggatgttgacgtttgtgtttattttaatttgggtattgtgttgttattttttagaagagaaaaattaggtagtgttttgtgaaggggtagcgttttttattttcgataacgttagttttatagttatttagatgagtagatgggggatataggggaggatttagatttgttttttttttatagtatatttttgagttttggaaagagttgtgaaaatgttataggtataaatatttgtaggttatttttatagggatagtttcgtgaggcggtgtcgtttatttttataattttttgttataggtaatatttaatatttagatagtgatttaaggtcgattagggaggacgttagttaggatgtgttatttttagttttttaggatatgatgttagtaggggtaaagttatttttagtaataagatagaggaagaaaggataatagaagaaaggataatgttatagtagtttttatgattaatagagacggttttagaagcgtaggataattttatatgtagatgttgttgttgtgtaattatattttaagaggggagtttagttggtttttagggtgttcgttgtttttagttgggggtttgtaggatattaagttttgagaatgttaggttttagtggagtaggatgaattgatagatatatagtaaagttttatatatttttttttttttttgtgtttgtaaagtttttttttagtgtttttttttttttagttattattgttggttggtttaaaaaaataggataatagtaaaaattagagataagtgtttggttataaagagaaatattggttattttttatatttttaagcgtgggtgatggttgtagttttttattttattttgtaggggatgaatttagaaaaagtttttgttataaattaaaatggatatgttagaagtattagtttaaattaattttgttttgtttaattatttagtgatttaaaatgttatttggattattaattttaggggttagagaatggagttggagaaggagttgttagatcggggataaataattatgttatagtggtaataggaaatggaagattatttgtttataattattgaattatagtaaggtgtataaatatatattattgattgatagttttagttttatgtttaagaaaattatcgatggagtgaagtaattgaattattatagaagatatatttgtattttttttttttttaatttttagttttagggggtgtgtatatatataatatttgtgtatataaaataatatatattattaaagaaagtttttgtatagtttgttggagttatagaagtattattttagagtagagtaatgttttaaatttttagtgtttatttgtagaatatttattagtagttataaaagtgatttaatttttttttggaaataatgtttgtttgttgtgagatgttggaatatatatgaattattattatatgttaatatgttataaggagtttttgatatttgatttatattattagagttgttttttagtatttatgtgaatttttattttaaaatataagttagaagtttgagtgaaggatatttagggtaaatggtggttgaaagtgaggaagatttaaattattgttgtttgtattgtattaggaaaagaaaataattttttttttttttgttaattaaatttttaattgttaatttataattatgtttatatatattttaatattttaataaagtattttttatggttagttataaaatttttaaaaagattttgtttttttagaattatttttcgtattatagtttttattagtttagattttttagagaagtagaattaatagggtgtgtgtgtgtgtgtgtgtgtgtgtgtgtgtgtgtgtgtgtgtgtatttgtatttatattatgatatttatttatgtgattattagggcggtaagtatgaaaatttgtaggataagttagtaggttgaaaacgtagaaagaagatgttttaattttgaggtaggatttttttttttttgggaaattttagtttttgtttttagagttttttattgatcgggtgaagtttatttatattattgatggtaattttttttttgtaaagttagttaatttagtatggggaagggggttatggtagatatgggggagggttggtttttttatttttttatattaggttaatagggacgtagatatatttagatgtttttgtagaaagagatattagaggtttttgaagttataaaggggaggtatgaagaaatattgtattttagttttttataagatagttgttttaggttatagaaaataatagttatgaataaatttaggttagtggttataaagcgtaatattttgaattttttattatatatttaaagtgttttaaagaattatcgtaatttagttttgttttttgtattttattttttttttatataaggttttttaggacgttatttttataagttgtgagagatatattatagttttggttattgttattgtttggggtagaataaaaataggatttggttagagtttgtaggagatgtgggagaggaggaattatggtataggtgagtttttttatattcgttttttatagttatatatagtttgagtatttttttttttgtttttgggaagaaattattttgtgaggggttagggaggagatagggttatgaggttttagaggaattttttagttttggattttagagaagtttttaaaattgtgacggtagatttagggtaggaaatatgaggaaagtaggtgtgaggattgaattaattgtacggtatgtaaagatatatttggtatatagtagatataaagttagttttggtttttggtgaatttatgaatatgattgtattaaaatgtaattgtattgtataaaaattataaaatgaagaatattaaaaaattaggaaagattttattttatataaggagtgtatattttaatttattagtttattttaatagagaaaatgttatatgtttatttgttggtttatgtatgaattttttgttattgtataatatattattattaatttattggttttatatagtatttatttatttttttatatttttttaatgagaaatttaggtttggtgtgaatgatttttagtttaggattttacgaagttgtgtttttattttgaggttggggtttttttttaagtttatatagagtttggtggtagaatttagttttaggtagttgtgagattgtagtttttgtttttgggtagttgttaggtggaggtggggtggagttgtttttaatttttggagttcgttatattttttgttatatggtttttttatttttaaagtttatagcggaggaagttttttacgttgaatttcgtttatattgtgaatttttttgttgaagaagaaataagttgttttaagagtttatttgattaggatagtttaaggtaggataattatggttttaaagttaattgatttgggattttgtttatatttgtagaatttttttatagcggtatttatagtagtgttgattgagtaattggggaaggtgaattattaggggtggttatgtggaggttattattgaattattttcgtatagttaggattttttttttttgtttaattgggttatagtaggaaattgaagtttaaataaatagattgttgtgaatgttaataaaatatattttattgatatatggaaatattgaaattttaaaattaaataatattgaatattttttagttaatttagagtaaataaaaattaaagtgtagtaatttatttttttttttgaagcgttattgtttattgttgtataataaataatataaagtttgataatttaaaataataaatttttattattttttatagtttttagtggttaggaatttgggagagatttttttgagtgtttttggtttagggttttttataaggtttattgggggatatatttgttagagaatatggggagggagttagataattttgggaaaagtggtaggtttagaggtaaggttgattttagttttggataaaaggaaagaagggttgttggacgtattttagattataagtaatttaaggagagttgagtaaggttatggaggagttttttagttatagatggttaatagaggagttttttgttgtttaggaatggtttgttttagtgtttttgttgttacgtgttagtggttgggaatagtttatgggaagtagggtttttgtattaatgttgttgagaatgatagagtacgggagggaggttttgggaaattttttggaaatgcggtttaaattttttttttgaggggtttgggtttttggaaattaaacgttgttagattgggttgttggacgattttgtttatatttataatgggataagggaaataaggaagtttttaagtgaatttttgggttttatataaattttttttgtttttatcgtgtattagtagttttgtttcgttttggggatgagggtttattatttttgtttggagaggaggggagtgttttttttttttgtttgtttttaggtttatattgttttgcgggtaattgtaatgtgtagtttaatgggtttttgtttgtttttttgtttgagtgtttttttgtggaaaattaggattttttatattataaagtttagatttgggatatgagaagtttaagttttatagtgggtgaatataagggatgggatatgtagttatatttttttttattttttggtttttggatttaagtttttttttattgagaatatagtatcgtagtgatgtttttgatttaataaatgtatcgtgttttgaaagatggtatttattttttagtgttttttttaagttggttttgagttgtgtttgttgaaggtttgtttaatgttttgtgtggtcggtagttttcgtagggtgtagatggtgataggattagtggattttttggttatggtttatgttgtatttatttttatttttttgtgaggtgggttttttaggaagaggttgtgttgagagtaattttaaatttgtggattaggaatgttagtggtgttggttgagagtttgagaatagtgggggaaaaagtttatttatggaggaagtttttgttttagtgaggatgaatttttggtttttttatgatgaggtttaatgtggttaatgtgttatttagtggtattttgattatttaaagaaatagtgtttaagtagggtatattagggtttattacgggtgtttaattttgataagttggatatttagaggtggtagtagttagttcggttttggtaggtgggagttttattttttggaggttatttatgggtttagtagtattgatttttatcgattaaggttattgagtgatttggaaggatgggtatatgaagggagttattgtgatttttgtatgtatgtttttattttgtaaggtttgagatggtttttagtgaaggttggttaatttttatttgtttgtttggttgtttagtgttattttaggggtaggtattttttgggtagatggggtgttaatttggggtttgggtttattttatatggattattttcgttttatgatggatattgttgggtttgtttaatttataattttgtaggttatatagaagttaatttatataattatttggaattacgtggtttttagtgttttgtggttaagaattttatttgattagggttagtaatattaaaagttgtttcgagaaaggggtatatatttttgttgtggatgatatgaatttattttagaattttaggttttttattgtgattttttttattgatgtttagtttattttattttgtatttttgtttagttttgttatttttagtattagggggtttgagggatggtggttgtttgtattatagtttggatttgttgtagagtttttttttgtgtaggttttatttgaatttggtatttttttatgttatttaaaatgtggttaaaatgatatatttagatgtggaatgtggtgttgttagaatttaaagagatttattaggtagttcgtttttttttttttttttttttttttttattgaagatgaaagatgtaacgggtttttttttttgtttttttttgtttttatttggaagaaatatttttgtatgtatttagttattggatttataaaattttattgtagttgttatttttaaatttttgtaagatttatttttttttttttggggtgtatgtgttttattaagatttttagtatattttttatttttttttttatttattttaatttatgatgttgttaatgaaatgaatagatttaatattttgtagaatgttcggtattttttaagattatgttatagatgatagaagagttataatagtttttagggaaagtgtaaataaatgtggtatgaatgtgaataattttatatttattttttagttggaaaggaatgtatttagtaaattttcggttgtatattattggtttgtagttttattaatttttgttagtagtgatatttagttagtatggtagttgtaattaagattattatttggttaagtttgaagtaattttgtttattttttaggttttattgggtttttgtaaggatagaatatacggagataataggtaattttagtattattttattttttatagttttttaatggtggtgttattttttataatatttgtaataatttttaagatttgttttgggacgtaatatcgtttcggttgggataggggtagttttagaggtttttttttagtttttagcgtaataagagttattaatttataggttagagacgcggtgtgggggttattttagttgttagtgtattaatgttattatgtatttaaggaatagggaattaaatagggttgggattacgggattgtgagttataatgtgttttggtttttggaagtttttttgtgatgggatacgatggtgttgtaggaatttgggtattaatgttagtttatatataaagttaatatttatttaaattttgtttatttttttttttcggtgtatagttttttgtgtaaatggttgtaggtttttttgtagaagagtttagggaattgatttagtatatatttttagggtgttttagggtttttttttttagggatatggattttttttttttgttattgggatttgaatttgaaagttaggtgaggtttaggtattgagaatagattatgattttgttttggattaaatatttttagttttttgttttttaatttttgttttttttttatagatattaagtagcgtttttgttggttgtttttttgttttgaatttgggatattgttttttgttaattttttttatattttttgtaggttaagtataattttgtttgttttgttggggttgttatggtaattgtgatttttgatttttgtagattattgttattatttgatttagttgaagtagttttagttggaagaatagagaattaaaagaaatttttgtgaagttattatttaggtttgttaatttgtaatattttaatattattggttatatgtagtatatatagaaaataatagaaatatatgtagatagttttgattttttatagttttgttatgtatgtgttttagtcgatattgtattgagtaaagtaaggattgttagtggggagtggcggatgttttgaatttggtgaatgtttttatattgttataaagtttttaaaatttttttgttttatatgattttagatttcgtataaattgttttttgttgaatgtattattttgtggtttgttttattatttaatatggtttatgaggtgaatttatatttatagaaatagttattttgtttttagttttggatagtatttatgggaggaatattttataatttattttttttgttcgtgatttttagtttgtttttgttatagatattgttataatgaatattttgggttatttttttttggttttttgtgtgagttttttaagatatggatgtaggaatgggattattgtgtttttattatgtggtgttataggatgttaaattgttttttgaagaggttgtattagtttttttttttaaaattttttttgatattttataggttaagttttttttttttttaattggttgtttttttttagtttttttttattggttttttttgttgtagatgttggagtattttggggtgttattatttttttaattatttcggtgttttttatttttaggattttaaatattatttagatatagatggtttttaaatatatatttttatatatttttataattaaaaaaataatggtattaaaataggtattttgatatattgtagatgggtttgtaaattggaaatgtttttaggaaaggtagtatggttatttttgtttaaattaaaaatgtatatatttagtagttttatttttagaaatgtgtttaaaatatatttgtatttttgaaaaatgattgtatttagaattatatgttgtaattttgtttgtaaaagtaaaaagaaaagaagaaagaaaatgatagataaaagaaaaaataatttaaatgtttgttattaggggattggttaaaaaagtattgtaagttgggtatagtagtatttatttgtgaatatattttattttattttgggtaatataaggaggtttttttttttaagaaaatttaaataagtattgtatagttatacggtagagtttataaatatttaatataaaagaagaaagatatagaaaatttttgatatttttttatgaagaaataaagtaaggtgtagaataatatatagagtttgttaaaatttgtgtgaaaagggataaaggatatatatgtatatatttatatttgtttgtatatgtataaaatatatttggaagaataagtaagaagttaatatttttggttgtttgttggggatgagatagggtaagagagagatattttattttttgaatattttgaattttgaattttgaattatattaagaaataaaagataatttttaaggagattaaataaatttttaaaaaatttaaaatgaaaaattttttaaaaattaatggaattttttaatttttatcgaaataaaatttaaaaattttttaaatattatgttatttttttaataaggaggtttatcgttattttaatttagtatattgttttttttttaattgtatgatttttttttatatttattttttttttattataaggtaaaataatagtatgattaattaaatgtagtttgtttggtgaaggaaattttgtttaaattttggtttaagtgggaaagggtttttaggggatttagtgtagtagttatgggttttagtatgtttacgacgttttttagtgtttgtgtgggtttatggatgttatatttagaaaatattggaatttttaagtatacgtgattgaagttatttgttaaatgtttaaggttttattaatggtttatttgagtatttgttatacgcggttattttatttttggattagaaggtatatttagagtttttagtgttatattttaggtttaatttgttgagattagtcgaggaaggtttggaggttagtgtcgtgaggggtgggaagattgagggtgtgggggttagttgtggagtggcgggagttttaggtgttgtatgaagtcgagtttttggattattttgtgattttatatttggtttttttttgggtgttttttatttttaggatttttaggaaataaaatgttgtaagaatggggtggggagttgtttagggtgggttaggtgtggttttattgattttatatttttgttttttagtttatttttagtttttttttgatattagaaattaatatagattgttttagggtggtggtttttaaagtgtggttttgggggaagtagtattggtattatttgggaatttagatatgtaatttttagggtttggtttggatttattgtattagaaattttgtatttaataagtttttagtagaattttgttttttaaattagatttttttttttttttttttttttttttttttgtttttttttttttttttgtttttttttttttttttgtttttttttttttttttgtttttttttttgttttaagttttaatattgagtagttgtgatttttggatagttaggtgttagatatttttttttgttaggaggtattaggttttttaattagtttagttttatttttggtttggtttagggaaagatgtttattttttggattttgagtaaagtttttttattttgggtgtttgtggggtttttatttatattataaaataaagtttaaataatattatttttttttatgagatttttggtatttttttattagttagagttgaagatttatatatatgtttattaagtaagtgtgtatgttttattagttagtttgttagttttgttaatgtattataacgtagtagttttttagtttttttttgtgaggtgttatttggagttttttgttttattattaagagaattaaggagtatggatataaagggtgaggttggagtaaaagtttaataagtaaaagaagaaagtttttttttacggagagggggtttggaagatggttgttatttttatagttgaatgtaaaggtttttataagaaattgatgagggttgggtgttttatttgtataaggtatgaattttcggtagttttattttatttttttagtgtttatgtaggtttttagtttgagttattttatattgttttgtttttttgattgtttacgtatcgggggatagaattttttattgcgggtatgtttgggtaagttttttgtgtagttttttttatttgtgtagttgtgggtatgttttaggtaagtttttttgtgtaagtttttttttttgtgtttgtaggttgtttttttgtttgaaataatttaattgaggatttattataattgttcgtttgattagtttttttttttttttttttttaatttgtgttatgatttttttattgatttttgtttgagtaagattgggtacgttttgagggtaaggagggtttatttttttttattttagttttagttttttttaaaataacgttttgtatatagtaggtatttgataaatgtttattaaatgaagggattgtttggaatggtttggtagataggaaagtagaatgaaaatttataggttaaaagtggttgggaaaagattttttaaattttagtgatgggtatagggttttttaaagtttatttttggaatttttttatttgttttgttttttttttattagggatatttatgttttttaaagtttttttagttatatattattttttaggattattttttagattagttaggtgtaaattttatagattttttgtttgtggttttaaatgtttagttgaaattttgaggttaattttagtggagttagaggtttattttttaggagtggtaatggttggttttaagattcgagaagtagtgtttatattttaaaagagaagatcgttttattagaaatgtagaattttggtatgtgcgggttcggggtttttaggagataaagaatgatagttttaggagcgttgggattttcgtgtagttattagttattatagtttaggtaggggttgggtttttatttcggttttttttttgtacgttttggatgtggatggttttcgagtgtgaattcgtttgggttttgattttgggtgtttttttcgttgttgtggagtttttgcgggtgtggtgtatgtatagggggttttataggagattcggggttttttagagtttgaaggttaatatttttggagaatttatgttaggtatttaggtttttagggatttagatgtttaaattatgaaaatgagagaatttattttatttttttaggtgtggtgagatttatattatatgataatcggtcgtttatatattgattatatttttagtattgtttttattagtcggttaatgtttaaaatttaaagacgggttaggtatggtggaggacgagttttttttttattttttgaaggtgttattaataggaatttttattttgtggagtttagaggagattttttttgaagttgagttgggaatggatatttggattttttttttttttttttttttgagatagagttttgtttttattatttaggttggagtgtagtggtacgattttggtttattgtaagttttgcgtttcgagttttagcgatttttttgttttagttttttgagtagttggaattatagatatttattattatatttagttaattttttgtatttttagtagagatagggtttcgttatgttggttaggttggtttcgaattttttatttcgtgatttgttcgtttcggttttttaaagtgtagggattataggtatgagttaatgcgtttggttagatatttggatttttttaaaattttattttaaatttttaaaattttttaataggtattttatttttttaggaagtaaaattttaagtatagaaaatataaaaaggtataaagaagtagaaggatggaaattgttagtgtttttattgggaggatcgggatgaaacgttgtttggtagagttttagattttagagggaaggggtttggagttgtgttttgtagttgtttttgagtttttatttttggtttttgtgtatgcgggtgattgtgtaggatgatttagtgtcgttatgtttatgagttattttgaattttgttttttaaaattttattattaatatataattttttattatattataaaatttttttatatatagtttttattagttgtaggttgtttttaaatagaggatttagttattttttttttgtatgttttttttattattgtaattaatatttttatatttaaagatttttttatatattggattttgttttaaaattatagattttttaataaaagttattgggttaaaaggtatgaaatttttttttttttttgagatggaatttcgttttgttatataggatggagtgtagtggcgagattttagtttattgtaatttttattttttgggtttaagagatttttttgttttaattttttaagtagttgggattataggtatacgttattatatttggttattttttgtatttttagtagagatagagttttattatattggttatgttggtttcgaatttttgattttatgatttattcgtttcggttttttaaagtgttgggattataggcgtgagttattatgttcggtcgtatgaatatttttaagtttttttatatatattattaaattattttttaaaagtagtgtatcggttgggcgtagaggtttacgtttgtaattttagtattttgggaggtttaggcgggtagattacgaggttaggagatttagattattttggttaatatagtgaaattttatttttattaaaaatataaaaaattagttaagcgtggtggcggacgtttgtaattttagttattttggaggttgaggtaggagaatggtgtgaatttaggaggtagagtttgtagtgagtcgagattatgttattgtattttagtttgggtgatagagagagattttgttttaaaaaaaaaaaaaaaaaaaaaaaaaaaagtagtgtattaattatatttatttatttatttaatttatatttattgagttttttttttgtttttggatttttagatgttggaaatttaagtggtgattagataaggtttttgtttcgaagaatatgataattaatgaaataaatgaaaataattttaatatcggtgataattgttatggagaaaatatgtttgagttagaaggttgatggtggtgaggatggtaggagatatagtttgttgattaagatgtttttgggaatttgaatattggacgtttgagtagagatttgaatggtgtgaggggtttttggatttttttggatttttggggagtaggtgtatttggggagttttagtgggaggtgtttgagataggattgagtagtgttagtggagatgaatgagttgggtttagaggggtgggatgagttagagtggttagaaggattttgtgatgagggatgaggggttgtaaaatatagtgagagattggggttttattgtgttaagaagggaagaggttggtatgtttgtgggacgcggaggcgaggatgagttttaatttttatttgaaatgtttattttgattattgtgtgggtgatggatagcgggtgtgagagttagtaggtagtttagttggaaggttttttggtttattattttggagaggatggttttggggaggaggtagtagaggagtgagaagtgattggatttggggttaatatatttttaagatggtgttagtaataattttttggagaattatatatttatttgtttattttaattttatagtaatattcgaggtggtttattgtaataaatttagtgtaataaatatatacgaattattttaaaattaacgttaaggaaaatatatattttaaaagattaaggttggggtaaagttggaatattattaggtaggaaggaatatttgaaatatttgttgaaatggagttgattttttatttagttatagatttgttgttttacgattttattgtatttgagtattagggagggtggtggtagtttaggttattagttttttgttttttgatttaggaatagcgttttgttttatatttatagttaaagtaaattatattattataagatgtttaatgatgaagttaaagtttatagagttagtaagtaagtgtaaaaattttaggagtttaaggatagtttatatttttttttagaaatggtttttttatgtattgttgaagggagagggtttttttaaggggttttaagacgtagaagtaattgggttgtagttcgaaataaagatgttttttttatttgtaggttttacgaagttttataggtaattttggtgattttatttgagttaggaattcggttttttgatgtgggttttttttgagttattgtgtgagttttaaaatgtgatgtggagattttgttatattggtgtttttttgtcggaatttgatatttatggtggttttggtttttttgtttggttttaggaggaaatggagtgttttgtatttttttttagtttcgttttgtgtaggaaggattaggagatttggagttaggggtttttttaattttatttttttttataaaatagtgttttttaagttttttgggggtgagggttttgatatcgtgttgttttgatgaatataattgttttagtttttgaaataaaagtataggtgtataaaatatttattgttgtaagtaatgtttaggtggggatgttttttaggcgttaggtttagtattttgattttgtatgtatatatataggggttaggtattgtggtttatgtttgtaattttagtattttgggaggttgaggtatgagaattgtttgaagttagaagtttaagattagtatgggtaataaagtaagatttagtttttataaaaaaaaaaaaaaaaaaaaagggtatatatatatataaatatatatatatatatatatatatatatatatatatatatatatattgggtgtggtggttttagtttgtagttttagttattcgagaagttgaggtgggaggattgtttgagtttaggagttggagtttgtagtaagttgtgattaggatattgtagattgttagagtgagattttgttttaaaaataaataaaataaaaatatatatatatatatatagttagagttagcgttgagggagaggttggatttaggggcggggttataggcgttttttaggtttttttcgtggtttttgttttttttttttggaggtgggggattttgtattttatgaggagaagttgtttgaagaaggtgggagatatttaggagtagggtttagagagggaaaaggatgaggaagtggagataaagtagagggggtaggataagaggagagtacgtaaggaatggggatggggaggattttttagttgttagaaaggttattcgtagaatttggtttttggtttttttgttttattaggatggatttgggaaattagtcggagtgggagataaggagtttattttgtaaaggatacgtgtgagtttttttttagtttgaatttatgagtagtagttaatagttaggatttttgtgtcgggtacgtgaggtttttttgtaattagggcgttttttgtattttattagttattttttttgggattacgttggttttttttaattttaatagggagagaaggaaggagaggtttggagggtttgggtttttttttgtgttttttttttttttgttatttattttttgagtgttttcgtttttttttcgttatttggattttattatagtaatgtatattggtttggattttttttgtaattattaagtgggtttattttgtcggttatttagacgaagtcgatttattaagataggagaattgtaatagagaaagagtaatttatgtagagttagttgtgcgggagattagagttttattatttaaattagtttttttaaaaatttttattagtttttaaggataatttggtggataggggggttagtgaatcgggagtgttgattggttggtttcggtatgaaattatagtgagtggaggttatttttttaggttgagttagtttttgaacgtgggggttataggattggttggtaggtttagatggggttttttagttgttaaaaatataaaaatttgaaaagatattttaaaaggttattttgaggtttataatagtgatgttatttttaagagtaattggagaagttgtaaattttatgatttttggaataatggttggtaatatttagaattttagttttttttattttaatttaatggtcggtggttttttttcgttttataagaatagtttttttttaaattataaattaaatttttttttaaggttagtttagtttatatttagaaatgaagaagggtagtttagcggttggaagtaagatggggttagttaggtttgatgttttttattgttattatttttttagttataattttgtaaaggcggttttattttggttttagttttatttatgtagtaatattgtgttttgtttttttaattattgttattaggtggaagtagagcgtgtatcgtttagatgggttagatttttataggtttattgttagaacgaatatttttgagattttagatttgaaagttagtttgatttttgaaagttttggatcgtttttaaaattaaattaatattttaggaataagatttgtttcgattttgtttttatttaaggacgttatggtaacgtagtttttaaacgtgttttgagaataaatggaatagggttttttgtgtttttatttatttgcgtttttttttttattatagttaatcgtttttgtaaatattgttatatatttttttattttattgaaaatattttttttaaatgtattttaagaaagatttaatgttatgaaaatatgaaggatttttttgaaagagagtttttggtggtgggttttaatgaatatttttttttttaaaattttgtaattatttcgttgtggggtttagttttatatttttaaattgaaatatttttttttttaatttttatataaatttaagtttataatttttattattttaaaattttatttatttttttgttttggggatagggtttttttttgttatttaggttggagtgtaatggtataattatagtttattgtagtttggaatttttgggtttaagtaatttttttgttttcgatttttaaagagttgggattatagttatgaattattgtaatttatttaaatttaagtttatattaaaagataaaattttaatattgtaggggattggttaggtggtgggaataattataaagataaagttataggaaatagatataaatttttttggaaagtggaaagttttgtaaaagttttaggatagggttatagttgaaagtagtttaatttttttattttgagttaatagtttcgagtaagtataaagatatgtaagagagtttatttaaagagtatgtttatttttgattatttgtaggattgtttttttcgggggattgcgattagattaattatttataggtgtgttgatttaaagtttttgttattaaatttgtgttgaataaaggtttatagggttagatagttagggtacgtagttgttataattttttttgtgagtggtttggttttttggtgtatttttttattgaatatcggtgtttgagtatattatttatttatcgtgtagtttgggtttgtcggttagattttggtataatatttaagaggaaatgaaagttataaagttattttagtttttggagttattgttaaaattttggtgaggaattttttaggtttttttttattttaaatatatattaatattatgtaagtgatattagtggtattttcgtttaggttggaatgtagtggtatgatttcggtttattttaatttttattttttagatttaagcgatttttttgttttagttttttaaatagttggaattataggtatttattattacgttcggttaatttttgtatttttagtagagatagggttttattatgttggttaggttgattttgaatttttgattttaggttatttgtttgttatagttttttaaagttttgggattataggtatgagttattgtgtttagtttttttaattttttaaaaaaggttaaaagtatgttgggtatatttttttatagtaatatttaaaattgtttttattttttttaatgataatatagaattttatcgtgtagttgttttttgggagacgattaaaattttttttatttttattgtggtagtggagatgtgggtgtgtataatagttaaaatttaataagttgaatattttaaatagatgtagtttattgtatgtaaagtatgttttaataagatgatttaaaaatattattttttttgagatttgtattttgtttatgtgaaataaaataaaataaaaattttgtttttgtgtttaggagatatattttgatatatttggaggtagagggttatgttgtttgtaatttatttttataggttttgaaataataataatagtagtatatttatagatttagagagagagaaatttgtggtaaaaatgtttataagtaaaattagataaagggtaaaaataaaagaaataatgaaattacgttttttaaatttttttttttcggtcgggtgcggtggtttacgtttgtaattttagtattttgagaggtcgaggtaggtagattacgaggttaggagatcgagattattttggttaatatagtgaaatttcgtttttattaaaaatataaaaaattagtcgggcgtggtggtaggagtttgtagttttagttattttagaggttgaggtagtagaatgttttgaattcgggaggcggagtttgtagtgagttaagatcgcgttattgtattttagtttgggcgatagagtaagatttcgttttaaaaaaaaaaaaaaaaaaaaaaaaaatttttttttattttttttttttttttttttttttatttttttttttatttttttaatacgtttttttattttttttttttttttttattttttgtatttgattttcggtatattttagtttttaggttaataaattttttcgcgttcgtcgggagtaggttagggaagggacgcgaggcggcgttgttatcgtattttgagcgtcgtagttttttgggttttttgtattattttagtgaaggttattttagttttttatggaggttaaattaagggtgtaaattaggatttttattgaagtggcgggattttaagaggtttttttttggttttttagttgtgggtttttttgcgggcggcgtagtcggtttttattagaatcgtttagaggcggacgttgtttttttggggtgacggagtagtaggaagcgttttcggattttggaatacgtgggcggttcgtgggaggggttgaggcgtagttttttatttattcggattcgaatttttcgcggtgttgttttaagaaagtcggattttagatcgcgttttagttcggattcggaatttttgttttgcgggtttgtatttttataacgggtaggtgtgagtgttttgtagttggagattagaagtttgaaggtagttcggttttttttagtttatagcgtcgttatttcgtttttatattagtaaatatattttatttttcgtagattagggcggggtgacgggtgattttagttttcgtagtgaatttcgggtagtaaaatttaaaatatatgcggttaaggtcgggtacggtggtttacgtttgtaattttagtattttgggaggtcgaggcgggcgattatttgaggtcgggagttcgagattaatttgattaatatggggaaatttcgtttttattaaaaatataaaattagacgggtttggtggtgaatgtttgtaattttagttagtcgggaggttgaggtaggagaatcgtttaaattttggaggcggaggttgcggtgagtcgagatcgcgttattgtattttagtttgggtaataagagggaaaatttcgtcgtaaaaattttcgggggcggagcggagtttcgttttgggttatgtaagcgatcgcgttgggtcgtttttttttttttttcggattttgtagtggcgtttaaagtttgagagagggaagtcgtttttgtgttcgtgagtgtatggggtataaggtaagtgttgagggagaaaacgtagttgatggggtagagtagacggggttggaggtggggtggagggggagggttttggatagaagatttgggaggtttggtgggggaggggcgtttaggtttgggtattaagaaataagttttttggagtttaagattatttcggttttttttagtttaagagaggattggttttatgattttttgaaattatttttaaatgttttagaataaattttgtatatttattattgttattgaattattaaaagttttttttgggggcgagttgaattagattttttgttggagttggtatacggaggaagttttggagggagggtagatatcgtggaggtaagggtttgggatttgtgttaggagagttaggtttattttttttttagttttttattaggtttatgatttttagtagtgaaaataatttttttaaggtggggaaaggatttcggtttttgttgtgtttaataaattatgaggattaaaataaattattagtgaatgtgaatgggaaaattaagaaattgttaaaattttcgaatatattatatttttatttatagaaaagtataggttagggattatgggggaatagttagtaatgatagggatagttgaatttaaaaaaaaagtttgtgaggttgataaagaagaaacggatatattttttgattttggagggtttatagggtagaagatggtagatgatagttgggtgtggtggtattcgtttgtagttttagttatttaagaggttgtggtgggaggattgtttgagtttaggtatttaaggttgtagtgagttataattatgttattgtattttaattgagtgatatagtaagattttttttttaaaaaaaaaaaaaaaaaatttatggtagggtataatgagtattattaggaaggtttaaattacgggttaaattagtagttttaaaatttgattatatatcggaattatttagggaattttaaaagatattaagatttaggtttaatttgggtttattgatttaataatttaggttgtggttgtggtttgggaatatggatattaaaaattttttaggtggttttacgtagtggttaggtttgatgatttttgtttagatgttttaacgattaagagatgtgcgttggggataaggtaatttttttagtagaaagaggttttcgggatagtatttttattattgagaattgagaatttatatgttatataatttatttttttaaagtgtgtagtttagtggtttttagcgtaattataaggttgtgttatcgttattattgtttattttggaagatttttttttttttttttttttttttttttttttttattttaaaggttagttaagtgaaatagtgggagtgaagaagaaataaagatatttataattggttgtgattaattagttgtaaatattgtatttagattagtttgggaagattttaaggatatggtgtggtttgatgggttttaaggtagaggttataatagtttggaagagggagattgtttaggtagtggtattttggtgggatagggtgaggagattttagagtttacgtttattgtaattttggggagatgttattagagaaatgggggtggtgttagatagtagattgtggtagttgaggttttttacggtagagtagaagtatttattatgtgtgatatttagtagatggggcgttgtgggtggtttggagtattttggttgtaattgaggtaggtatcgtgtttaggaaggttgtgtagtaatttaggttgaagggaggggaaagtttagattaagattgtggttgtgggattgaaatagcgttgaaggagttgattttgattttcggagatgatggggaaagaggaaattagaagggattaaggatggtgatgtttttaagagaaattgaggaggaagagaggatgatatggtggtagacgtatagagagtttttgtagattttttatattggaggggattatggtcggaggtatagatgttttaaggtaggttggaaaagggagtttggagagagtttggtgttgtagtgaattatagggagtcgtttttttggttttgtgattatttagggattgaatagagaggcggttttgggagattttagatatttagaggatataagggggtgaaaggggggtttggttttgagttaaagggaggagaaggagattataaagttgaaacgtttaagagagtttgtggtttgagcggttttattgcggtaggtgtttttgagaggtagaggtggttgagatttggaaataggtttgtaaatttggttattggttttattgttagtaacgttgtgcgcggttgagggagtgtgttgggagaatagttacgcgttgtttgttttggaaggaataagttagtgagagtcggtttaatggggcggtcggcgaaaggggtttggtgaggttcgcgtttttcggggtgggggcgcggggatgggtggtcgcgatgtcgggagggtaggtagggttttggtcgtgtttatgaagttggagttgtatttttagttattcgaagttggtttttgttttaggttgcgttttcgcgtgttttttattttttgggttttaggtttcgttttttaaatttttttaggtttttagtttattggaatttttttttttaagcgtggtttcgtttttttcgttcgtgattggttttaagtttcgggttttagttttattggatgagcggtcgggggatcgggttaggtgattaagttttcgcggcgtttttttttcggttattgtttgagtcgttgagagggtggcgacgtcggggttatggggttgggttcggtttttttgtttttggttggtatttttttttttgtattttcgggagttgttgttggtgagtggcgtttttggcggttttcggcggagcgggagtagtgggacgttttcgggggtcgggtgggtagcggcgagcgttgtgcggttagggcggggtttttgtgttttgtcggtggcgtagggagttggacgcggttcgttatcgttatattttagttttgttttttcgttattttttagtttttttcgggatcgcgtattatttgtattttttggtttttttttgtttttttttttttcgcgtttttttcgtttttttttatttttcggataaattagtttttttgaggtttatgggttttcgggttgttttcggggttgtttttgtgaatggtattcgagtgtttttttagcgcggttattgaagtagttataattttcggtgttcggggcggtttttaggtttttgaagttttgttttttttcggagtcgacgtgtttttagtttttgggtcgtagtttttggagtaggggtttttttttttcgggattcggagttggtgttttttgttgttgtggggattgtggggggttttgatttttaagttgaggggttggagtttgtaggtttcgggtagaggattttttttgcgattttttttatttttagtttatttttttttcgtttttggtttcgagggttttttttttttttttattttatttttattaatgattagtgatttaaggatattagatttttttttattttttttttgtttattttagggttcgttgagtttttttgtttttttagttttttgttatttttttttgtgtgttgttttttgatttatttttagggtgttttttgtttttattttttgttttcgttatcgaagttttttttgtattttttatgggttttttttataagtagtttttatttagtgttgtttttatgttttttcgtttttaaatgtttttgattttaattttttggtgttgttttttattcgggggggttttttttttattttatttttttttagatttttaaggggaattttgatgttaatggtagttgggttttaggtagggcgtagggtagcgtagatgtttttttttttttagtgtagatgtttgttttggattttgttttattgtggttttttttttatttttttatttttagttttatttttttgaggattttattttttagtttataggtgttggattatttttttttggttttttcgtttttttttattttgggattttgtgttgtttttattttttgtttagttgttttgggtttttagtacgtttttattttttagtgggaaagtgggagtgttggagtatatgatagtgttgagtattttttttaagttttatttttttttagagtattttttttttttgtttttattttattttaagtttttttatagttatttttgttttatgtttatgtcgttttttagtttttgttttgtttattttttttttttaatttagatttaaaataggttgttgggttaattgttttttgattttttttttttttttttggttttttgattttagtgggtttttattttttatatcgtatatttaaaatttgttttgtttgtttttggggtgttattgttttttttttagtattattttttttggtaggtttttttttaggttgagaatttttttttttattttggttttttttttttggttagtatttttattttttgttttgtttttaatttttaatttttgtttgggtacgtagtagatatatatgtatatatttatggggtatatgggatattttgatataggtttataatatgtaataattatattagggtaaatgggttatattataataagtatttattttttttttgtgttataaataattttattatgtttttttagttatttttaaatgtataataaattattgttgattgtatttattttgttgtgttatttattagattttatttattttaattatatttttgtatttattattaattatttttgtttttttattttttattattttttttagtttttggtaattattattttattgtttttttttatgaggtttattgttttaaattttggttgttataaataagtgagaatatgtaaagtttgtttgtttgggtttggggtttattttattttataggatgatttttagttttttgtaaatgatacgatggttgaatagttttttatatatatatgtatattatattttttttatttatgcgtttgttgatggatatttagattgtttgtagattttggttattttgaatagtgttgtaataaatatggaaaagtagatagttttttaatatatcgattttttttttttggagtatatgtttaatagtgggagtgttggagtatatgatagttttattgtatttttagtttttggaagaatttttatattgttttttatagtggttgtattagtttacgtttttattaatagtgtatatttttattagtattttttatttttatattttcgttagtattttttattgtttgttttttggataaaagttagtttatttggggtgggatgttatttcgtaggagttttgatttgtttttatttgttgacgaatgatgttgagtatttttttatatatttgtttgttatttatatgtttttttttgagaaatgattatttagatttttttttatttttaaattggattattatatttttttttttatagttgttcgagttttttatatgttttagttattgattttttgttagatgaatagtttgaaaatatttttttttatttttggatggtttttttattttgtttattgttttttttgttgtgtagaagtttttttatttgatatgattttatttatgtaattttattttggttatttgtgtttgtggggtattattttaaaaatttttgtttagtttaatattttagagagtttttttaatgtttttttgtatagttttatagtttgaggttatagatttatatttttaatttattttgatttgatttttgtatatggtgaaagatagggtttagttttatttttttgtataaggatatttagtttttttagtattatttttgaagagatttttttttgttaatgtgtgtttttggtatttttgttggaaatgagtttattgtagatgtatggaattgtttttgggttttttattttgttttattggtttgtgtgtttgtttttatgttagtattatgttgttttggttattgtagttttgtagtataatttgaagttagataatgtgatttttttagttttgtttattttgtttaggatagttttatttattttggtttttttgtggttttatatgtattttaggattatttttattatttttgtgaagaatgttattagtgttttgatagggattgtattgaatttgtagattattttgggtagtatggatattttaataaaattgatttttttaatttatgaacgtggattattttttttattttttgtgttttttaattttttgtattagtgttttttgtttttggtttttgagatggagttttatttttgttgtttaggttagaatgtaagggtgtgattttggtttatcgtaattttcgttttttaggtttaagttatttttttgttttagttttttaagtagttgggattataggtatgtgttattgtgtttggttaattttttatttttattagagatggggtttttttatgttggttaggttagttttgaatttttgattttaggtgatttatttgtttcggttttttaaagtgttgggattataggtatgagttattacgtttagttatattattgttttatagtttttattggagaggttttttatttttttagttaggtttattttttagtattttattttatttgtagttattgtaaatgggattcgttttttgattttttttttagattatttgttgttagtattgatttttgtatgttgattttgtattttgtaattttattgaatttgttttttagttttaatggttttttggtggagtttttaggtttttttaaatattagattatatgatttgtaaataaggataatttgatttttttttttttagttttaatgtttttttttttttttttttgtttgattgttttagttaggatttgtagtattgtgttgtataattgtggtaaaattagttatttttgttttattttagattttagagaaaaggtttttagtttttttttatttagtatgttattagttgtgagtttgttatatatggtttttattatattgaggtttgttttttgtatatttagttttttgagagtttttattatgaagggatgttgaatttattaaatgtttttttagtattaattgaatgatattggtttttgttttttattttgttgatatgacgtattatattgattgatttgtgtatgttaaattatttttgtatatttggaatatattttatttgtttataaagaatgattttttttaatgtattgttgaatgtggtttgttagtatttttttgacgatttttgtatcggtgtttattagggatataggtttgtagtttttttttttatgatgtgtttttgtttggtttttgtattaggatatttttggttttgtaaaatgagtttggaagtattttttttttttttattttttagaatagtttgaataggattgatatatgttgttttttaaaagtttaattgtggtaaattatatattatataaattttattgttttaattatttttaagtgtatattcggtggtattagatatatttatatttttgtgtaatttaaaattttgtgtttattaatcggtaattttttatttttttttatttttggtttttggtaattattattttattttttgtttttatgaatttgattattttaggtattttatttaagtagaattatgtaatgtttgtttttttgtttttggtttattttatttataatatttttgaggttcggtgggtatagtggtttacgtttggatttttagtattttgggaggttgaagtaggtggattatttgagtttcggagttcgaaattagtttggttaatatggtgaaattttatttttattaaaaataataaaagttagtcgggcgtgatggcgggtgtttgtaattttaattatttgggaggttgaggtaggagaatcgtttgaattcgggaagtggaggttgtagtgagttgagattaggttattgtattttagtttgggtaataagagtgaaattttatttttaaaaaaaaaaaataaaataataataataataatatttttgaggtttatttaagttgtagtatgggttagaattttattttttttaaggatggataatatttattatatgtatgtattatattttggttatttattttttagataatggatatttgggttatttttattttttggatattggtaaatattttattttttttgggtatatatttattttttttgggtattttttttgggtatatatttagaaatagaagtagtatataggggttttattttttttgtttttttgttaattttgttttgtgtgtgtgtgtatgtgtgtgtgtaggtgtgtgataatagttattttgattggttttaggtggtattttattgtggtttggatttgtatttttttaatgagtgttgatattgagtatttttttatgtgtttgttgattatttgtaattttttttgaagaattggttatttaagttttttgtttatttttttttttatatagttttttttattagatatatgatttgtaatatttattttatttcggggttgattgtttttttattttgattgtgttttttgatgtatagatgttttgaatttttattagtttattttgttagttttttttattttatttgtgttttggtgttatatttatgaaagtattgttaaattttatgttatgaatattatttttaatgtttgtttttaagaaatttttaggttttagtttttgagtgtagagtttaggtttttgatttattttgagttaatttttgtatatagtgtaaattaagggtttaattttattttaatattttttgtttttagaattatttgttgaaaagattaattgattttttgttatttgtttattttagtggatattagttgttttatttaattgttgttttggggttttgttatgttatttttttattttgaatttaagtttatatcgttcgttgtttttttttgggatattgattttattataaatttttttggggttataatttttttattttttgtgttttatgattatttttttttttgttttcgttatgtttatgatgagttttttttcgaggtagttttttttgtttttattttatttttagtttatgtattatagttatattggatatgggtttttttgagtttgagtttttttttatttttattattttttttggtaagattttttttttattatttttatgttttttttttgtttttgtagggtagtttttttttttggtttttatttttttagggggtttgtggttatttagtttttgtatttggtttataagtttgttatttttattttttttttttttgtttattagtttttttttttatttttttatttttatagttttttttgtatatgaaattttcgtttttgtttttttgttcgtgtgtattttttgttttaggaaggttgggatagtagatttgtgtgttaaatattaatgtgaagttatttttaggaagaagttttatttgtgatttttttttttttagagttttatagttttcgttataattttacggtgttgttttgggatggatttgtgtagttagggttttttgttgaggtatatttggatggttagttttttttgcgttatgataggtagaaatgtagggtaaagttttagggatagtgggtagaagatgttttgggaaataagatatgggatagagagattagggatttgatagggaacggaaaggattttaggatgattttggtttatattaaggattagaaagaaggtgagagtcggtaggggtaagagtgattggagaggttttttttagaaaagttaggggtagagagtagggatttgtttttttttattggatttggtttaggttgggggtgaggaatgggggttagtggaatttagtagggaggtgagtcggtatttagtttatatagggaggtatggaggagggttagggaggtatattttttgggttgagttttttatttgggtggaaaggtgatgggttcgggaatggagaagttattgttgggtgggggtaggtttgtattttttttaggagattagggtttgtgagatttatgaagataatagtattaggagtttttagtatttttattacgatggggagtttttttttttttaaaatttggagattgaggaatggatagtgttttagttttttagagtttagattttggttatgaacgttaggaattttttgaaggaagatgttatgaagattaagatatattattacgttatgtatgtagattgtttgtaggaattacggcgatatttagaattcggcgtagttttgaggagaataggtatcgacgttggttaggggtttttttttttttttaattttgttagagttgttttattttttagatgtgtttagggaaattttttttgtgttatggatgaaggtattttttgttggtatatcgtgttttgatttttttttattgttagagttattggataaagatagagggttagggattggattatttagtgttgtaattagggtaagtagaggatttttcgatagaattttgagtttgtggtgggtgttaggtaggagaggaagtttttagggttagggttgttttttttgttttttagtttgtttattttggagagtttttttttggttttataatttaggagtttatttttgatatttttttttttagtattaatgtggggattttagagtttgaggttatagttttaaggtttatttttttgttagtttggaagaattgggttttagagtgaggatagatttgtaggttaggggtttcggagggttttagttagagtgagaatagtgaagagaaatagttttgttttttttttttttttagaggggagtagggttttattggttttgtttttttttttttagtgttttttatggtgaatgttattcgtagcgaggttttagagggtaatattatcgtgatatgtagggtttttagtttttattttcggaatattatattgatttggcgttaggatggggtatttttgagttacgatatttagtagtggggggatgttttgtttgatgggaatggaatttattagatttgggtggttattaggatttgtcgaggagaggagtagaggtttatttgttatatggaatatagcgggaattatagtatttattttgtgttttttggtgagtttagggtgattttggagagggttaggttagggtagggatagtagggatggttgtggttttttgtttagtgtataataagttttttttttttagggaaagtgttggtgttttagagttattggtagatattttatgtttttgttgttgttgttggttgttgttatttttgttattattattttttatgttcgttgttgtaagaagaaaatattagttgtagagggtttaggtgagaaaagcgggtagtttttggagatggtaaggtttttgtttgggtagtagggtttttttattgtttttgtaaagataggtatgttggtgataaggttttcgtaataggggatgaaagttggggaatttgggaagggaatgggggtagtatttttatttatatttataagtgttgtttaagtaagggttaaacgtttagttgtggtatttttttgttgtaggtgaggagtgggtagtagggagggttgcggcgtttgttttgtttttatttcggtttttgtgttttttgaatttattagggcgtatttaggtggggtgagttgggaattacgtgttgaatgttaagggtttggatgattacggttttagagggagtaaatagtaaaggtagttgtgatttggggagggttagaaattggagaggaatttgaggagaggcggtgtttttattttttttttttttgtattttttttttttgtttttttagttatcggggcggatatcgagaaaaagatttatgaggtttagtttgggggttttgtttgtgtagttttttggagattttttgtaatagggagggttttgagtatatatggttatttttgtttattttgtagttttttatgtattttttttaggagtttttttggggttgtcgtgttttttgtattattcgaggttttattttttttaggtttttacggtttggtttttttgagttttttgtagatgatatggatgagtagataagtagatgtttttgggttatttgaggagtggggtttagttttttattagggtagttgtggtttttgtttttattttattttcgagtgtttttttttttagtttttgagggatatagtttttagggtttatgtttttggggatttaatttgtgttttgtggttttattttgttttttttgagttaatttttttttttaaaggtggttattgtttggtaagtttggagtaagggacggttagaattattttttttatagttaggttgtttgatgggggatgaaaagagatagtaggaagttttgtgtttttgtaaagatagaagtagtttaggcgatagtaagaggttggggtgtttaggaggatgtgtttggtagtagggtcgttggttttttatttttgaatttaattgtattgttaatcggttttttaggtttgagtagatgggaaggtttgttttttgttttgtagtaagagggttttgtttaggaggtatttataataggggtagtgtaggtttgtggttatttttgtttttatttgtggcgtttttcgtagagggattgttagttttggttttttgtgggtaggaatggtttttttataggttattggagttttggttaggaaaagagtatgaagtttatgtgttagttttttaaaatttttgtttttaatgttgatgtttagtaaagatattcgtaattttagttttataattttaataggattttttttaatattgtgaagtatattatatgaaataggaatataaattttttaaaatttttgcgatgtttaataaagatttttataattttagttttgtaattttaataggattttttaatattgtaaagtatattaaatgaaataggaatttaaatttggagttttttttttaggaggttttgtgtggagatggtggttgtggtagtggtagtttttaggtgtagagggtgggtagaggtagttttaggttaaggggttttttttattttatatggagaaaattttttgtaggttgtaagggtagtggtcgggtggaatttttgttagggatagagtaggaaggtttcgtagttttattaagtagtagttttggggtggagttgcgtttttagggttaagcggattaggtaggagtagcggttatttaagagtaggttataggtttgggttgtgagggttaggagaggttaggttttttcgagtaaggtgggggttttagggttaggttaggtgtagattttgtggtagttacgtttttttatgttgggtttgttgggttttttaggttttttgatggggtttttagttaggagttgtttgtttagggttgggaggggaggagtattgagttgtagatagagggtagagtttatagtgggtagggtttgttttggtgtgtaggtgtttttgtaggagaggagggtttggggattgagagtaagggttagggtttttttttggggaggttttttattgtaataggattggttaggtttgagaggagggtattgggtttttttttgggttttgttttttagttttggggttttttttttttttgtacgatgagtggtgggtatagggtacgggttgatgttgatggagtgatgggagggaattggtaggggttgggaaaagtaaggagggaggaagaaaaaagtgggggttttatttttttttagagaaagggtaaatttggttttggagtaattgaagagtgaaaagtttttagggaataaatataatattgtatttagtggagtatttatttattttttttttttttttagagttcgtgagtttgtaggttttggattaatatttagttgggacgagtgattatagggatgttatatagttcggattttagtttttgatgttagtttttgggtttattggttttattgagggtatttagattttatagttaggcggttggaattgaattttttgtttggattttataagtatttttttttttggtgttttagttttttgatttatgaaatagagaaaataaaagtatttatttattgttgttggaggttgtaaaatgttagtagatatgaggtatttgtagttgtgttatattaattggtgttattgtttttgttgttttcgtattattattttttttttttaagatagagttttaggttaggtacggtggtttacgtttgtaattttaatattttgggaggtcgaggcgggcggattataaggttaagagatcgagattattttgattaatatggtgaaattttgtttttattaaaaatataaaaaattagttgggtttggtggcgtgtgtttgtagttttagttatttaggagttgaggtaggaaaattatttgaatttgggaggtggaggttgtagtgagttgagattatattattgtattttagtttggcgatagagcgagattttgttttaaaaaaaaaaaaaaaaaaagatagagttttattttgttatttaggttgtagtttagtgatatgattttagttcgttgtagttttcgtttttcgggtttaagtattttttttgttttagtttttcgagtagttggggttatagatatgtattattatattcggttaatttttgtattttttatagagataggattttgttatgttggttaggttggttttaaatttttgattttaggtgatttgtttgttttagttttttaaagtgttgggattataagtatgagttattatattcggtttattttattatattttaatttattttattttattatattatttattatgtttggtttattttattatattttaagatattttaatatattacgtgtgttgtaattggattattatcggtgagttttgtgagtgagtgttttggagatgattttttttgattagtttaggattagtttttttgttattttgaggttttttcgttttattatatttttacgtattattttatgtttattgttatgggtgtgtaattttatattatagatgtttattttttaaatagatatttttagtttgttttattttatgtgtttgggagcggataaagtgtgaggtttagggagaaagagaggtttgttttaatgttttggtacggtatgaagataattttttttttttgttttttttttttgttagtttttgatgattgatagatttatagtagaatagaaaggattgggaagggatggaggtgggatatttggtattgatttttaggggttgattttgtgggggaatatttgttttgaagagttggagtttttatgtgatgatatagagttgaagtgtgatattcgggaggggatagagagtgtttggaggttttttgattttgaagaattttagttagttaggttttggcgtaaagtgattgttggggaggtgtggattgaatgaatgaagaataaatgaattaggaaagtggatatgtaagaggtgggttattttttattttattttttgatgttttttgattgttggtgttggggtatatagatgggtgatgtattttttggttaaggtaattttagttttatttacgtaaggtggttatggtagagagtgtaagggtgatatttgtgaaaaagatttaaggtagggatgggagttttttttgtagtaggagtggatgtaggatttgtttggaagtaagagaaggacgagggattttggttgggttttgtttttttttattgtttggtttataaagtaattagtaagggagttggagtagggaatttatttatgtgttatttattgatttagagatgtgttcgttgatatttttttttatgtttttaggttgatgttatttatatatttatgtatttatgttgtgtatttattagttttgtttattttagttagtaagtgttatttgttgaattttgtttttattaggtataaatttttatatttattgaagtttttataattaaaatttaattgtttatgattttaaaagttaaatatttgtataggatttttttagagaaatgagttttttttgtatttttttaatttttgtttttttagaggtaattatttttaatatttttagttaagttttttaatttttatttttatatgtttaaatataatttttttattaatattgtttgattttttcgttgtagttattatttgttgtatagtatagtggtgaatgtaatagttaattgtatttgtttttttttattttttttatttttttattttttcgatgtatttttgtagtaattatgtttggtttagtcgttttttgtttttttttttatgattaatttttttatatgttagtttgattattttttattttttgaatatttgttttttttgtagttaatatttgtttttgtttttgtttattttataaatagtatttattaacgttgatattttttttatttgtattatttttttttttgggatggagttttattttgttgtttaggttggagtgtagtggtgcgattttggtttattataattttcgttttttaggtttaagtaatttttttgttttagtttttcgagtagttgggattataggtatttattattatgtttagttaatttttgtatttttagtagagacggcgttttattatgttgtttataatgatgtcgattttttgatttcgtgatttatttattttagtttttgaaagtgttgggattataggcgtgagatatcgcgtttggttttttttttttttttttgagatggagtttcgtttttgttgtttaggttggaatgtaatggtattattttggtttattataatttttattttttaggtttaagggatttttttgttttagtttttcgaatagttgggattataggtatgtattattatattcggttaattttgtatttttagtagagatagttttttcgtattggttaggttggtttcgaatttttgattttaggtgatttattcgtttcggttttttaaagtgttgggattatagaggtaagttattgtatttagtcgtattatttttttaagaaattatagattttggatattttattttatttttttggaaatgttttttttgggtttttttcgttgtttttatttggattggaggtttttttttgtggagtagagttattgttttaggatttttttttatcgttatttggggtagtgttttatatgtagtggagttatttggggtttagttaaaatgtagattgatttaagatgttaaggttgaggtatatgagtttttttgtttagttttatgagatgttgatttttttggttcgtgtgtgtgtgtgtgtagagagagagagagagagaaagggaattttgttttgttagttaggttggagtgtagtggtgttattatggtttattataggtttaattttataggtttaagtgatttttttattttatttttttaggtagttaggattataggttatattttaatatatttttaattaattgatgtagtttttttttaaattagtaagagggttgagtatttttttattgtggtaaaaaatatatataaaatttattattataattatttttaagaatatagtattattggttaggtgtggtggtttatgtttgtaattttagtaatttgggaggttaaggtaggaggattattggaggtttatagtttaagttaggtttggggaaagtagtgagattttgtttttagttaaaaaaaaaaaattaaattaaaatatattgtattataatagtgttaattgtaagtatagtgtagtgtaatcgatttttagaatattttattttgaaagttgaaattttgtgttttttttataaaaatttttattatttggaagttttatttggtagttattattttatttttatatttattaagtttgattgttttagatattttatgtaaatggaattatgtagtatttggagtttttttttttttttgattggtatattttatttagtaatgattttaaggtttatatacgttgtagtatatagtaagattttttttttttaaatgttgaataatattttattgtttgtatataattatatttttttgatttatttatttgttggtaaatatataggttgtttttatattttgtttgttgtgaataatattattatgaatatggatatgtaatttttttttttatttttgtatttttttttattttggtgtaattaattttttagtagttttttttgaaagtacgtgtttaaagtatatttgtgtgttttaatatatttattattattttgtttttttttaggaagaggaaagaaatgtattaaggtgttttttggtatagtatttaatggtaaagaaagaaatagtataattggttagtgttgggttttagtattttgtaattttagaattattgtgaatataaaagaaagaaaggttttgtttaggatgggagttatttttatatatggtggttttgggatagtagattttttttgttatattttttttatgagggtttttattttagtgattgtggtgttttttttttttttatggtttatttatttatttatttagttggttgggtttttttggagaattttaatatattaatggatagtaagtaaataaaatttagtattattattaattgttattgagaaaaatatgtttaggttagaagattggtgatggtgggaatagtagggatatagtttagataaggttattgagtaagacgtttttgagaatttgattattggttatttgagaagagatttgaatcgtgtgaggagtgagttatgtgaatttttggggagtaggtatatgtgggagttagagtatgggtaggtggtagaaatagggtagagtattgataagaggttggtgtgagtggagataagtgagttgggttgagaggagtgggatgagtttagagttgatagaggggttttgtgttgaggggtttttaggaaatggtgagatattggggttttattgtattaagaggggaagaagttagagtggttttgggatgtggtggtgatgatgtgttttaattttcgtttgaaaggtttattttatttgttgtgtgggtgatggatagcggcgtgaatgtttttttatgtttattatttatttttgaatggcgttgtttttttaatggatgagttgtagttttttatgtattttgaatattaattttttattagatgtatgattggtaaatagttttttttattttgtgtattttttttttatttttttaataatgttatttgttgtaaaaaagtttttaaatttgataaagtttaatttattatttttttttaattgtttatgttttgggttatttagttaagaaattattattaaatttaatgtttataagattttttttaatgtttttttttaagggttttataggtttgatttttaagtttcgttgtttgatatattttgagttaattgttgagtatggtgtagggaaggttatgaattgtgtttaatattatttttttgtatgcggatatttagttttttagtattatttgttgtagtattatttgtggaagtgaggttgatatatttgtaaaatgtattgagtattagtatattatgtatttatttatttttttttattttatagttgttttgaggaggtttttagtgataaatataatagaaatgaaaatatatgaatttttataaaattaatattaagtagaattataaattttaaaatgttaagagtgaggtaaggttagattattattagataagttgaaatatagattgaaatggagggtttacggttttttttgttataaattttgttggtttataatttgttatgtttattgtataagggagttagttatagggtgggttgatagtttatataattagtttttggttttttgttttagaaataagtttagattttttttatttatagtaaaaaagtgaattgtaggatgtttaaagtgaagttgatatttataaagttaataaataagtagtaagtgtagattttagaaatttaataagattttatttttttttttaaaaaaatgtttttataattttttgttgaaaggagagggtttatttaggggattatatgatgtcgtttttttgttgtagttttaaattaagttgtttttttttttaattataggttttataaatttttgtagttagttttaatgattttagtttgattaaggttttgggtttttgatattgtttgtatttgagttgtagtttggggtttagaaatgtgatttgggtattttgttaaaatggtatgtttttttatagaatttgacgttgtggagattttgtttttttgttaggtttttagaggggatatagtgttttgtatttttttttagtattttattagtagtgatagaagatttggagtgagggttttttttaatttttattttttgtttagtgtagaggattatggattgttgtagttatggtaataaaaaatttttttagatatagtttttgttttttggtgggaaaattttttttggatgagaatattagtttgagaggtagagatatttaggagttgggtttggataggggaagggaagaggagatagatataaaacggagtggggttgggaaataggtaaagggagtttaggtttggagggatttggtttgatgaggtatatgaggaatggggagagtggtaggattttttattgttagaaaatcgtatttgtatttattgtatttttagttttggtgtatgtatttttgggaaattagaatgaatttggttattatggtgttagaaagagttttgaagagtttcgtgtgtttgttaatgtaatgaaagtgtaggtgatagttttttttggaaatattgttgttaaatgtttaatttagatttgtttcggtttttaggaaatatagtagagagaagagtaaagtaaaaggtattaggggaaataatatgataaattcggtgtggagagtatgttaaagttatttggtttgtaataagtaatgttgttttaaaagaaaaaaggattagtggattgttgtagattataggtaattaaaggatatataattaaaggtaatgagtggatattttatggaattaagttataaaaatgtataaagaatagattgaagaagtgaagatatttgaatatgaaaggattttagataatatggaattattgtttattttttttggtgtgataatgtaggtttttatttttaggagatgtacgatgaggtgtttagtggtgaaatattatgggtttagtaagttattttagaatggtttagttaaaaattttagtttttttattttgtttttttttatatatatatatatatatatatttatatatatatattatataaatatatatagttgaagtagtataaaatttagtttttagtagagggatgtaaaaagggaggagaattggtaagttagagttttttggtaaaggattgataatgcgttatatggataggatttttatttcgttagttggtgttgttgattttgaaattttatgtgtattttagattaagggtagagagagatgtttattgtggcgggtaggggggatgtgtttttagaaaattataatgatatttttttgagttatatttttggttattatagtattttttgattttgtttaataggattatttttttgaattgtaaaatttttgtagtattgtatatagagaaagaataggagatatggtaattatggataagaaaggaggaaatcgtgataggaaagttagagattttgttgttaatatttagttaggtattcggaggttggggttagtttagaagttttttataatgttacgtggtagttttatttagaaatttttagttgttttttgattttttttagttttaggtgatggttagattttttatgaaaggaaattggtttaaatacggttaatatgtttagtaatttatgggtaatgggggattttttatgttttttttaggaagtttgtttttcgttttgtaatgttgggagttatattaattatttttaaatggttgaaggggatttagtatttggtttgatttgattttaaaaatggaggttaagagttttaaaataaaaaaatagagtggaggtttgtttttgtatttattattttgatgaatgtattttgggattttgaatgagtattaaaaataaagtagtatttttgtttggggtgatatttgagatgtattgttttatgttaagaaaattaaggatatagatatatataaggagtgagtttaggagtagaggtttaataggtaaaagaaaagaaagagaaagaagaatagtttttttttttgtgagagaaggggtacgtaagtgggaattttagtttatggtagagtgtattggattttatatataggttgaaagaggtgtttgatttgtatagggtttatagattggttggattaggtgtgatgtttatatagtgtatggggaagttgattattttattttaatttttttatgtaaataggttttttatttggttgatattatgttgtttgttttttgttgtatacgtggttggaaaggaaaagtgaagatggagtcgttatttgaatatgtttagttttaggtagtttttttttattggtataattgttggtatttatttaggtaagtttttagtttgtttgtttatgtttgtagtttaattttataggttgttttttgttagaaagaaaatgatttgggggttgttttttattaaaaggaaaattttattaaggatttttttatttttattatttgtttaaataatttttttttaatttttttattagttataaaattagttttaaagtatatattgttttgtgatattgggatatttggatattttgttgttataggagtttatttttgtaggtattattaaattgtttttttagttattaatattttaggattatgggttatgataagtaaggaatgtattttgttagtttaaagataaatttgatttgcggggagggggtggtttttagttatatgggtaagtttttttgtggtggtttttgagattttggtgtatttattatttgaggagtgtatatgtatttaatgtgtagttttttttttcgtattattttatgattttattttttgagtttttaacgtttattatattatttttttgtttttgtatgtttatataagtgagaatatatgatatttagattttaatttttgaattattttttttagaataatggtttttaacgtcgtttaggttgttgtaattgtcgttattttatttttttttgtggttgagtagtattttacggtatatatatatatatattatatttttttttttttaattatattttttattttgaggtaattatagatttatatgtaattgtaagaaatagtaaagagggtaggtatggtggtttacgtttgtaattttagtattttgggaggtggagagagtaggattatttgagattaggagtttaagattaatttgggtaatatagtaagattttgtgttttattaataaaataataataataataaagagaaatgttatatattttttatttattattttttaatgatatgttataaattatagtataatattataagggatattgatattgatatggttaagatatagaatagttttattattataaggagtttttatgttatttttttataattatattgattttttttcgtttttatgtttaatttttggtaattattaatatattttttatttttattaaatttgttattttaagaaagtgatatgaatggaattatgtagtatgtgtttttttgatattggtttttttttttatttagcgtgattttttaaagatttaaggatttatttatatttttggatgtatttattaatagattgttggtttttttgtttttttgttgttgttttttttaattatattttaggttttagggtatatgtgtataacgtgtaggtttgttatatatgtatatatgtgttatgttggtgttttgtatttattaattttttatttatattaggtattttttttaatgtttttttttttttttttttttttttttaattttacgataggttttagtgtgtgatgttttttatttcgtgtttaggtgtttttattgtttaatttttatttatgagtgagaatatgcggcgtttagttttttgtttttgtgatagtttgtttagaatgatggtttttagttttatttatgtttttataaaggatataaatttattttttttatggttgtatagtattttacgatatatattatatttttattttttatttattgattgacggatatttgggttggttttatatttttgtaattgtgaattgtgttgttataaatatgtgtgtgtaagtattttttttatataatgatttttttttttttggtatatatttagtagtaggattgttggataaaattgtaaatttatttttagttttttaaggaatttttatattgttttttatagtgattgtattagtttatatttttgttagttgtgtaaaagtgttttttttttattatatttatattaatatttattatttttttattttttaattatggttattattgtagaagtaaggtggtattgtattgtggtttttattggtatttttttgataattagggatgttgagtatttttttatgtttgttggttatttgtatatttttttttgagaattttttatttttgtatttagttttttttttgatgggattatttattttttttttgttgatttgtttgagttttttgtagattttggatattagttttttgttaaatgtatagtttgtgtatatgttttttttttttatgggtcgtttgttaattttgttgattattttttttgttatgcggaggtttttttgttgaattaggttttatgaatttatttttgtttttgttgtatttgtttttgggtttttgtttatgaagttattgtttaaattaatgtttagaagggttttgtttagtgttattttttagaatttttatggttttaggttttagatttaagtttttgatttattttgagttaatttttgtatacggtgagatataggatttagttttatttttttatatgtgagttgttaattattttagtaatatttgttgaatagggtgttatttttttattttatgtttttattttttttgttagagattagttgattgtaagtatttggttttatttttgggttttttattttgttttattggtttatatgagtttttagggttttttagttgtataattatattattagtaaatagtaatagtttgattttttttttgttaattcggatgttttttattttttttttttgtttgattgttttggttagaatttttaatataatgttgaagataagtggtgaaagtggatatttttattttgttttagttatcgggggaatgatttttaattttttttatttaatataatgttgtttgtaggtttgttataaatggtttttattatttttaggtatgttttttgtatgttaattttgttgaagtttttaattataaagtaatgttggattttgtaaaatgtttgttaaatgttttttgtgtatggttaatattaagtgttaatttgatttggattgaaggatataaagtattgattttcggtgtgtttatgagggtgttgttaaaagagattaatatttgagatagtgggttggggaaggtagatttatttttaatttggtgggtatagtttaattagttgttatttaatataaagtaaatagaaaaataagaaaaggagagatattggtttagttttttagtttatattttttttttatgttggatgttttttgtttttgaatattggattttaagttttttttttttgggatttaggttggttttttttgttttttagtttgtagatagtttattatgtgattttgtgattgtgtaagttagtatttaataagtatatatatatattatatattatatatgttttatatatattatatattatatatgttttatatataatatatattataatatatattattttattattatattattttgttaatattaaatattaatataatatatattatatataaaataatatatatataacgtattaatttatattttgtgtgtgtgtatatatatattttatatatatattttatatatatattttatatatgtattttatatatattttatatatatattttatatttattttatatattttatatatttattttatatattttatatatttattttatatatgttttatatattttatatatatattttatatatattttatatatattttatatatatattttatatatattttatatatatattttatatatattttatatatattttatatatattttatatatatattttatatatattttatatatatattttatatatattttatatatatattttatatatatattttatatatattttatatatatattttatatatataatttatatatatattttatatatattttatatatatattttatatatattttatatattttatatatattttatatattttatatatattttatatatattttatatattttatatatattttatatatattttatatatattttatatattttatatatattttatatatattttatatattatatatatataatatatatattatatatatattatatatatattatatatattttatatatattttatatattttatatatattttatatattttatatatattttatatattttatatatattttatttatatattttatatatattatatatattttatatatatattttatatatattatatatattttatatatattatatatattttatatatattttatatatatattttatatatattttatatatatattttatatatattttatatatatattttatatatattttatatatatattttatatatattttatatatatattttatatatattttatatatattttatatatatattttatatatattttatatatatattttatatatattttatatatatattttatatatattttatatatattttatatatatattttatatatatattttatatatattttatatattttatatatattttatatattttatatatatattttatatatattttatatattttatatatattttatatatattttatatattttatatatatattttatatatatattttatatattttatatatattttatatatattttatatattttatatatatattttatatatatattttatatatatatattttatatatatattttatatatattttatatatatattttatatatattttatatatattttatatatatattttatatatattttatatatattttatatatattttttatatatattttatatatattttttatatatattttatatatattttttatatatatattttatatatattttatgtatatattttatatatatatattttatgtatatattttatatatatatattttatatatatattttatatatatatattttatatatatattttatatatatattttatatatattttatatgtatattttatatgtatattttatatgtatattttatatgtatattttatatgtatattttatatatatattttatatgtatattttatatatatattttatatatattttatatatatattttatatatatattatttatattttatatatatagtatatatattttatatgtatatattttatatatattttatatatatatattttatatatatattttatatatattttatatatatattttgtatatatatattttgtatatatatattttatatatatattttatatatatatatattttatatatatatatattttatatatattttatatatatatatattttatatatatattttatatatatatatattttatatatatattttatatatatatatattttatatatatatattttatatatatattttatatatatattttatatatatattttatatatatattttatatatatattttatatatatatattttatatatatattttatatatatatattttatatatatattttatatatatattttatatatatattttatatatatattttatatatatattttatatatatattttatatatatattttatatatatattttatatatatattttatatatatatattttatatgtatattttatatatatatattttatatgtatattttatatatatattttatatgtatattttatatgtatattttatatatatattttatatgtatattttatatatatattttatatgtatatattttatatatatatatatatattttatatatatatattttattagttttgtttttttagaaaatttgattagtatagattttggtaataggagtggttttagaggaatagaatattaaggatggagtttttttgttagtttaggggtttttggagttggttgtttaatatgattagatttaaaaatgttaaggattttatttttaatagtgtggagaatgttgatagtttttggtatgaattgtttagagagtaacgtaaaataaatgtattttatattatttattgtttttgagaggtaagtttagtgattttaatttaataattttgattatatgtagagaattaaggaatataatgaagttggttggttgtttttaagtttagtggataaagtgataaaagaagataatgaatttagggattttgttttttagttttagaagtagatattgagttttaaatttgttaagattgttttatgagtgatagttttattttttgtagagaaagagttgaaattgtggaaaaatagataaaagtttttattatgtgagtagttgatttgcgatgaaagatgtatatatagttttattaagtgtttattgttaaagtgagggtattgattagaaaagaatgagattttgtaatttggaatggggatatgtgggaggattttaatgaagttggggatattaagtgtgtaaattatgatgaaattttttttgttagaagaattagttttttcgtttttagtattggtaatattttttttttagtttatgttgttattagtttttttatttttatttgagaagataaattttgtattgtttgaggtaatagtgatggtttgttttgaagtagttgttaggtaagataatgttgattttttttaggagttatttttaatatttttgtttgtttttagatttatgattagattaaagttttagcggttttttagaggtgaggttgagagtgtgatttatgaggaggtgtattatatttaaaaagagttgttttagttttttaatttatattaatagaaatgtggagaataggtatgggaatggatattataggtatgggataatggtgaaaggaatatagagttggataaggttgaatttattgatttgggttattaagtaaggattttgtttttaatgttgtagttcggggagttaaagaaggttgtaatagtttatttttttggttagttgaaatatggattaaaaggtggtttattgtgagtaagttggaaatgtttgattttttttggtttaatgtagaggaaggaattaaaaagtttagggagattgggatggtggaatggattagttagtttagatttatttattttaattgggaaggtttagaagatttatttttgattagtgttttgtgaaataggtttgtgagggtagtatttgtatttttgaagagttttgtaattgtttttttttgtatgttagagttaatagtgggaattatagtatttaattataaaatttaaatataatgggaataattggatttcgaggtgttaggggttaagtggtagtatttaattattaaaggtaaggtgagtgtagttattataatggatagtagaggtaaagtggtagttataatagtttaatttatgtagagttttggtattggttaattaattatggtgtttttaggaatgaaattgataggaagtttattttatttttatttaatttatataagtagaaaatttttatgtgtaatggataaaagattaattttaattataaaaataaagaattatggttttttagttaatttttagatttgagttagtttatagatttagaattttttgaatgaaaaggaagttgggtttttttgaagaaggattttattatattattgataatttatgtagtgaatttttttttatttttttgtgaggagatttttagttttttattagggtaattgtgtattggggagaggaaaatgattagatattttaggaatataggatattggttttgagttgatattgattttagggaatttaaaatattattgtggttttttagttaaagtaggagtttatggagtttaggtaattaatggagttttagtttaggtttgatttataatgggtataatgaatttttagatttattttgtggttatttttttatttaatgtatttttttaattaatttttttaattaatgtattatttttttaatgtaatttttttaattaatgtataattggtataggaatagttagtagttggtagaatttttatattggtatgttgattggtagagtgagggatattatggtgggataggttaaatggaagttatcggagttgtttttatttggaaaaatagtaaattaataatgttatatttttggaggtatagaggagattagtgttattatgaagaatttaaaagatataggggtggtgatttaaattatatttttatttaatttttttaaatggtttgtgtagaagatagatagattttggagaatgatagtggattattgtaagtttaattaagtggtgacgattttaattgtagttgttgtattagatgtggttttattgtttgagtaaattaatatattttttggtatttggtatgtagttattgatttggtaaatgtttttttttttatttttgtttataaggtttataagaaataatttgtttttataatatgcgtttattgttttgttttaggggtatattaataatttagttttgtgttataatttgatttaaagaaattttgattatttttcgtttttgtaagatattatattggtttattattttaatgatattgtgttgattggattcggtgagtaaaaagtagtaaatatattggatttattgatgagatatttgcgtgttagaggataggaaataaatttgattaaaatttagggattttttattttagtaaaattttaggggtttaatggtgtgggatttgttaagatattttttttaaggtgaagaataagttgttgtatttggttttttttataattaagaaagaggtataatgtttagtgggtcgatttggattttggaggtaatatattttttatttgggtatgttatttcggtttatttattaagtgatttgaaaggttgttagttttgggtagggtatagaataggagaaggttttgtaatatgtttaggttgttgtgtaagttgttttgttttttgggttatatgatttagtaaatttaatgatgtttgaggtgttagtggtagatagggatgttgttggagtttttggtaggtttatatagttgaattatagtagaggtttttaggattttggagtaaggttttgttattttttgtagataattattttttttttgagagatagtttttagttttagtttgttattgggttttggtagaaattgaatatttgattatgggttattaagttattatgtaatttgaattgtttattatgaattggatgttttgtgattaatttagttataaagtgggttatgtatagtagtattttattattaaatggaagtggtatgtatatgatcgggtttaagtagatttcgaaggtataagtaaggtatatgaggaagtggtttagatgtttagggtttttatttttgttattttgtttttttttttttagtttgtatcgatggttttatgaggagttttttatgattagttgatagaggaatagaagaatagggttttgtttatagattgttttgtacgatatggaggtattatttaaaagtggatagttgtagtattatagtttttttttaggatatttttgaagggtagtagtgaaaggaaatttttttagtgagtagtttatttggttgtgtagtttgtatggaatgagaaatagttagatgtgcgattatatattgatttataggttgtagttaatggtttggttggagggttagggatttggaagaagtatgattggaaaattggtgataaagaaatttggggaagaggtttgtggatggatttttttggttaaaatttataaagatatttgtattttatgtgagtgtttattaatgggtgatttaagtagaggaggattttaataattaaataggatgattcgttttgtggatattatttagtttgtttttttagttatttttgttatcgtttaatgggttaatgaataaagtggttatggtagtagggatggagggtatatataggtttagtaatatagatttttatttattaaggttgatttggttatggttatttttgagtgtttaatttgttagtagtagagattaatattgagtttttaatatgatatttttttttgggcgattagttagttatttggtgataggttgattattggattttttttattatggaaagggtagaagtttgtttttattggaatagatatttatttcggatatgggtttgtttattttgtatgtaatgtttttgttaagattattattatggagttatagaatgttttgtttatttttatggtattttatatagtattgtttttaattaaggtatttattttatggttaaagaagtgtagtagtgggtttatgtttatggaatttattggttttattatgttttttattttgaagtagttggattgatagaatggtgtaatgattttttgaagttataataataatgttaattaggtgacgatattttgtagggttggggtaaagtttttcggaagattgtgtatgttttgaattagtatttaatataggatagtgttttttttatagttagaattttcgagtataggaattaaggattggaagtggtagtatttattattatttttagtgatttattagtaaaatttttgttttttgtttttataatattatgttttgttggtttagaggttttagttttagagggaggaatgttgttattaggagatataatatcgattttattaaattagaagttaagattgttatttggatattttgggttttttttatatttaagttaataggttatgaagggagttatagtgttggttggcgtgattgatttggattattaagatgaaattagtttattattttataatagaggtaaggaagagtatgtatggaatataggcgatttattaggatgttttttagtattattatgttttgtgattaaggttaatgggaaattataatagttcgattcgggtaggattataaatggtttagattttttaggaatgtaggtttgggttattttattaggaaaaaaaaatataatttgttgaggtgtttgttgaaggtaaagggaatatagaatgggtagtagaagaaggtagttattaatattagttatgtttacgtgattatttgtagaaatagggattgtaatggttatgaatatttttttttttttttgttaaaagttatgtttgtgtatgtatatatttggattaagaaaatatttttattttattttttttttttttattatgtgatataagatttattgattttatgttagtatttaagttttattaattttatgtaatagtatttggggattggtgcgtttttggttgtacgaaggattattgtattatgttggtgtaattatgattttattattgtttttgtttgaagattatgtatgattttaggagatgagtatgggtttaagttgataaggggtggatttgtgatggttaatattgagtgttagtttgattaaattgaatgatataaagtattgattttgggtgtgtttatgagggtattgttaaaagagattaatatttgagatagtggattagggaaggtagatttatttttaatttggtgggtatagtttaattagttgttagtaaatataaagtaagaagaaaaatttgaaaaggagagagattggtttagttttttagtttatattttttttttatgttggatgttttttgttttcgaatattagattttaagttttttagttttgagattcgaattggtttttttttttttttagtttgtagatagtttattgtgtgaatttgtgattgtgtaaattaatatttaataaatttttatatatatatatatatatatatacgtatatgtgttattagttttgtttttttagagaatcgtgattaatatatgtatttatcgagataataatattatttttgttttttattttgtttatgtgatgtattatatttattgatttgcgtatgttaaattatttttgtatttttggtatgaaatttatttgattatggtggattatttttttgatatgttgttggatggattaattagtattttgttgagaatttttgtatttatgtttattagggatattggtgtgtagtttatttttttggttatgtttttttttgtttttggttttatagaatgatttagggaggatgttttttttattttttgaaatagttttagtaagattgagattaatttttttttgaatgtttgatggaatttagttgtgaatttatttggttttggattttttttggttggtaattttttttttattgtttttttaattttgttatttgttattggtttgtttagtttttgtttttttttgatttaatttggagggttgtatatttttaggaatttattaatattaatttattttagattttttagtttgtgtgtgtaaaggtatttatggtagttttgaatttttgtggtattagttgtaatatattttgttttatttttattttagttcgtttgggttttttttttttttggttaattttattaatggtttattaattgtttatttttttaaagaattagttttttgttttatttattattttttatgttttaattttatttagttttgtttagatttttgttattttattttttatgttgggtttgagtttggtttgtttttgtttttttagttttttgaggtttgattttagattgtttttttgtgtttttttagatatttttatgtaggtatttaatgttatgaattttcgttttagtattttttttgttgtattttagggttttaataagttgtgttattattattatttagtttaaagaatttttaaatttttattttgattttaatgttgatttaaagattattgaagagtaagttatttaatttttatgtatttatatagttttgagggtttttttggagttaatttttagttttagtttattgtggtttgagagagtatttgatataattttgatttttttaaatgtattgagatttattttgtgatttattatatggtttattttggagaatgttttatgtgataatgataaaaatgtatattttgtagttgttgggtagaatgttttgtaaatatttgttaagtttatttgttttagggtatagtttaagtttattttgtttttgttgatttttttgatgatttgtttagtgttgttagtgaagtattgaagttttttattattattgtgttgttatttattttatttattagatttagtaataattgttttataaatttggaatttttagtgttaggtgtatatatattaaggattgtgatatttttttgttagattaatttttttgttattatatagtgtttttttttgtttttttttttttaaattgttgttgttttaaaggttgttttgtttgatataataatagttatttttgtttatttttggtttttatttgtatgaaatatttttatttttttatttttagtttatgtgagtttttatgtgttaggtatttttttgaagatagtagatattcgattggtggatttttatttattttgttaatttgtattttttaagtggagtatttagattattgatatttaatattagtattgagatgtgaggtattattttatttattatgtaggttgttgttttaatattttgttttttttattttatagtgttgttgaagagtgatggttaaatgtatttagtataatttatttatatttagttttttagataattgagttgggtggttttattttaataatgataaatatgaaattttaaatgtaatattattttggagagattatttgatttttttttataggaattgtttttaaattgttttttagatagttttataaagtatttagaatgtataaatttgatttttataatgtattaatgatatggtttggttgtgtttttatttaaattttattttgaattgtagtttttataatttttatgtgttatgggagaaatgtagtgggagttaattgaattatgggggtagattttttatgttgtttttatgatagagtgatttttatgaaatttgatgtttttataagtatttgatattttttttgattatattaatttttttttttgttgttatgtgataaggtgttttttgttatgattataagttttttaaggtttttttagtaatgcggaattgtaagttaattaaatttttgttgtttataaattatttagttttaggtatttttttatagtagtgtgagaatggattaatatagtaaattagtattaggagtggggtgttattataaagatatttaggaatgtggaagtgattttggaattgggtaataagtagaggttgggataggttagagggtttagaagaagatatgaatatgtgggaaagtttggaattttttagagatttagagggtttcgaagataggaagatatgggaaagtttgaaattttttagagatttgttgaatggttttgattaaaatgttgatagtaatatggataatgaagtttaggttgaggtggttttagatggagatgagaaatttgttgggagttggaataaaggtgatttttgttacgttttagtaatgagattggtagtattttgtttttgttttagagatatgtggaattttgaatttgagagagatgatttagtgtatttgttagaagaaatttttaagtagtaaagtgtttaagaggaagtagagtataaaagtttgaaaaattcgtattttgatgatgtaatagaaaataaaaatttattttttggagagaaatttaagtttattgtagaaatttgtattagtaagggggagtttaatgttaattattatgataatggggaaaatatttttagggaatgttagagatttttatagtaattttttttattataagtttagaggttatttttaagtgaaaaaattaattataggagatgatatgataataggtttattatagtagaggaaggtataaagtgttttttattattggtgtgtttgttaaaatggggaggggttattgagtgagtgggtagtgggtggtggtggtgataattatatttttttattgtggtttaatatttttgaagtagttttttatttttttattagatgtgttttttttatatgtagaaaatgtagttttatagtttttttattgggtgttggattgttggtattttattattttttttaaattaaagatatggatatttttttttttagttgatttttaggattttaaggttatttgggggaagaagttgtttgaggaggtttttgggtggattatggagttttttttagggatttatttggtgtttttggtgtgggtgattatttttttgagttttaaaagatagtatattttgtcgggtatttagaggtggggatagatgttaatagttttattttataagtgtaatatgaaatttaaggttagggaattttttaattttttttgaaggattttatatttagttttttgatttaaaattatttgtggatttgaataggttttttttgtaatgtattttttggaggggaatatattgaaaatatagtttatttttagatatttaatgggattgaaaagttgaattgtgtgtttttttgtagtgagtatagaggaatttgttgttttatgttattgggatatttttaggagtattatttttttttagagggtttgagtaaggttagtgaggaattaatatgtagtatattggtaattttagggttgagtagggagatatatatgtttttttgatgtgtgaagttttgagggtattttttaaagtatttgtttattgagtaggtgtttttattatttgtattaagttaggggatatggaagttatttttttagtaattaaatttaatgagaagatgaataagaagtgttttgaaagtaagtagaaaaggttttttttatgaatttttttaatttttagattttttttaaataatatgtttgaagttataattatatttttttttagtagtttttaaatgagaaaattattaaaagggtatttagtatttaagtggtggatataggataaatgttgaaaattagtgttcgattcgaagatagtgatgttttaggatgttggagttttttaggtgttagtagggaggcgggtcgggaattttttttagtaattagaaagaagagttttagggagatgaggatgttttatagttagggacgggatagtaaagggttttatgtgagtgtattatagggatttgtttttgtttagattttaatgtttagtatttagtgtagaatatggtaagattttagtaaatatattagttagttggatgaaggaggtaggtgtgagttagtaaaaaaaagtttgtgattttattggagtatgaatttaaaagtgttgatgtggttgggcgcggtggtttatgtttgtaattttagtattttgggaggtcgaggtgggtggattacgaggttaggagtacgagattagtttgattaatatggtaaaattttatttttattaaaaatataaaaattagtcgggtatggtggtagacgtttgtaattttagttatttgggaagttgaggtagagaattgtttgaatttaggaggcggagattgtagtgagttgagattatgttattgtattttagtttgggtgatagagcgagattttattttaaaaaaaaaaaagtgttgatgtatttattttgtaaggaggtagataggtagatagaagtatggatagatggatggatattttttttttgtgtttttttatttttgttttttttttgtgttttgttttttttttttgttttgtttgtattttttattgtttttttataattatgttttagttattattagtgatattttttatttggttttataagattttgtttgtttgttgtattagtagttataggatagaaaaaggaaaggagtcgtgaaaaataagataaggaaaaagatgtttttgatatggggtatcgggaggatgtgtggttttgaggttttcgggagataggggttgcgttttattgtagagtttattttgttgaatatagaggggaaaagcgttttgatagtttcgttcgtgttgtttagaaaagacggtttcgtttttagatttttttttttatgttttttagttttggttttttaggtataatttattgttatgaaaagggatttgagaatttttagaggagttttttagtttttttgtatggttttttttggttttttaaaagcgttagagatattagaaatgaaatcgtatatatttattcggagttttttataattattgaaatttttgtgagtgttaaagttaagtttttggtaatttcgttaaagtcgggtgtgtttaggatagttaatttaggcgttggatttttattttggttggattttatgatagtcgtattcgttataagaattttagagttagattttgttattttataattgttttacgttgtaggataagtaaatttagtttgagttttgtggattttagggttgtttaggagacgtttttattttggcgtggatgattttaggattagtttcgtttgttttatttagttcgtagtttggttttcgaaagcgtttagttagaattcgagagtagtgtggcggcgttttcgtgtggttataggattgaagatagaggatttcgtttttttttttttttagttaggacgttttaggttttttttttgtttttcgtatttggacgggattttgtatagaagagagtttttcggtttcgtgttaggttttgagtttatttagttttttaaaatttatgttgatatgaacgtttttttttataattgattgattggatttttgttttagggtagagggaggtttttagattaaaatagtaggattaggtttggagttgatttaattttaaatttttgttaatgtacgatttagttttttagtttttaggatgggattttggttttttgtttttttttttgtttttgttattgtttttgtaggtggaggttgtttattttaggaattagtttgtgagttttaattttggggtttcggtttaggaaggagggaggttttagagagtagaagggagatgaaatggattataagagaagaaggaattatattaaatattggaattgtaggttaattaaatttttttttttataagggggggggaggaagaggaggaggaaaaaggaggagggtgaaaggagttagggaggagagaaaagtgggaagtgtttttttagaaggggtgtgtgtgtgtgtgtgtgtgtaggtgtgtgtaaagtaggagggagtttttaggattttgaagaaaagagagtgaaggataggggttaaggggtttagttttggtaggttgagggttttattttttgtgttcgggttttattgttttagtagagtttagtttcgggaagtttggggttatagtattcggtttgttggatggttgtttttttattgtttttgatagtaggagttattttgttaggtttagtggttatagggttataggtagagagtaggtttttttgttggtagttaaggagatgtttttggaggatacgtgtataatttagttgggagtttgaagatggtggtgggttataaagagtttagcgatgagtttggtttaagattttgattttttgttttggattttgagggttttatttttttttatttttaataggttttaagaatttttttgttagttttttgtttttttgggatagtttcgtattttttttattttgatattttggtatttaggtatttgttttttttatttttttttagttatttaagtatttttaggttttgttttttgttaattttgatttttgaattttagtattttttaaatttattttcgaattgttggataatatagtggttttatttttagattttttaaaattttttatattgttttttatagtggttgtattaatttaaatttttattaatagcgtataagagtttttttttttttatattattagtatttgttattttattttattttatttattttatttttgtttttttagttgtggttattttatttggggtaagatgatattttattgtggttttgatttgtatttttttaatgattagtgatgttgaatatttttttatgtatttgttggttatttatattttttttttgaaaaatatttatttatgttttttgtttattttttaataagattgtttggttttttaatttttgagttgtttgagttttttatagtattttggatattagttttttgttagataaattgtttgaaaatgtttttttttgtttagtagattgtttttttattttgttaattgttttatttgttatgtagaagtttttttagttattatagttttatttgtttggttttatttgtgttttttatatttttgaagttttagttataaaatttttgttcggattattggtttagaatgttttttttgtttttttttagttgttttatagttttaggttttttattttatttaagttaatttgagttgatttttaatagggtgagagataagaatttaattttatttttttgtatacgggatatttatttttttagtttttttattgaagagggtgttttttttttaaatgtgtgtttttggtatttttgttaaaagttagttggttgtaaatatatggatttatttttgtattttttattatgttttattgattggtatgtttgtttttatattaatattattttgttttggatattatagttttgtaatgtattttaaagttaagtagtgtgatggttttagttttgttttttttgtttaggatttttttggttatttggattttttaaaaatgttttgggtttatagaaatattagaattattttttttaattttgtggaaaaataattttggtatttttgttggaatttttttgaatttttagattgttttgggaattatggttattttattaatattaatttttttgatttatgagtatggaatatttttttatttgtttgtgttttttttttttttttattagtgttgtatagatttatttttaagagatttttgatttttttgtataaatttatttttaggtatttttttttagttatcgtaaatggaattgtttttttgattttttttttagttattttattaataatgtatagatattatattgatttttgtatgttgattttgtattttataattttattgaatttatttattatatttaatagttttttgatggagtttttagatttttttagaaataggattattttattggtagggaggggagagaggttgaaggttaagttgatggttaatgatttaatgaattatgtttaagaaatatgatttttattaaaatttaaaagggtagggtttggagagtttttggatagttgaatatagggaagttaataggaggtgaataagaatttagttatgtgttagagagggtggcgtattttaattttatgggatagaagtttttgtattggaaattttttttattttgttttatgtgtttgtttatggggttttttgtgttttttaaaatatttttttaaataaattggtaaatatatgtaagtgtttttttgagttttgtgagttattttagtaaattaattaaatttgagaaataggttatgggaatattgatttaaagtaagttagttagaaatacgggtaaaatggtttgagattggtattaggagtgggaggtttgagattggtattaggagtgggagggggatagttatggggattgagtttttaatttatgggatgcgatgttatttttagggaaagagtggtagaatttagttagaggatatttagttggtgtttattatagaattgattgtttgtttgttggagaaattttttatatttggttagagaagttttttgtgttgatagttgttgtggtgtgagagtagtggaaaataacgtgagattttttatatttagagtggatttaaatgttgagttgtttttaaatttgatttagtcgtggtttgattaaataggattagatgtgagaaattttttggtataatgtataggaaggaattaaaggttgatgaggatgggagtgttggaatagatgttttgtgtatgagtattttttttattttttttgttttttaagaattaaaaaatattttttttgtagttttaataaatattggtttggaagagagtgattgcgttttttaaagttttaaatggttatgattgtaggatttttgtgatgtttaggaatgttttgatgttagcggagatgaaggaaaattagagatttaaaagttaaaggaaagggttatttattataatttatattatatatattttttggaaaaaaaagaaaaattttttggggaaaaagtattaaaattattaggaagttttttatatagaaatgattttattaatttgatttttgttattttttttttttatttatgtattattatttatagagatttttattttgtgggttttttatttaatttttgtttgtttggtttttttagatatagtgagattttgttttaaataaataaacgttataggttgtagtgtagtggtataattattgtttattgtagtttcgatttttttgtttgaagtaattttttagttttagttttatgagtagttgaaattataggaatatgttattatgtttaattaattttttaaaaaatttttttgtagagatgaggtattattatgttgtcgaggttggttttaaatttttgggtttaaataatttatttattttggttttttagaatgttgggattataggtttgagttacgtatttagtttttattttatgttttgatttattattattttttaagtttttttttagtatcgatagtttattaaatatgttatgattaaattatatttttatattttgatataaataaaaaattatatgagtagtaaagataaatatgaaaaagtaaaattattgttaaagttattaggaggataatttaaattatttgggtaggaaaattttttttttttattttatttttttttttagttagggttttattttgttatttaggttaaattatagtggttcgattatggtttattgtagttttgattttttaagatttaggtgatttttttgttttagttttttgagtagttgagataataggtatgtgagataatgtttggtttttttttatatttttagtagagatggggttttgttatgttatttaggttggttttaaatttttaggtttaaacgatttatttattttagttttttaaagtgttgggattataggtatgaggtattgtgttagtttttttttttttttatatttgttggaatggaaaatattttttaaatgagatataaatgtattaaattgaaaatgtttaaattttaaaggatttatatatatatatagttatttttcgtttaatggtgagatagtttttgagaaatgagtttttaggtgattttgttatgtgtggatattatagagtgtttttatatgaatttagatggtataatttattttatatttaggttacgtgataagtttattgtttttaggttataaattatatagtatgttatcgtatggaatattgtagttaattttaatataatggtaagtatttgtggatttaagtatgtgtaaatagagaaaaggtatagtaaaaatgtgattaataaaaagatttttaaaatggcgtatttgtttaggatatttattatgaatggagtttgtaggattagaagtgttttgggtgagtgagtgagtggtgagtgaatgtgaaggttagggtattattgtatattatttagattttataaatttaggttatattaaattgattttaatattgtttttttttaataataaattaatttattaataattaattaataattttattatttatttattaataattaataattaattaataattagttattatagttttttgtaattttttgaatttttttgttttattattatattttaagttttagggtatatatgtatattgtgtaggttagttatatatgtatatatgtgttatgttggtgtgttgtatttattaattcgttatttagtattaggtatattttttaatgttatttttttttttttttgttattttataatagtttttagagtgtgatgtttttttttttgtgtttatgtgtttttattgtttaatttttatttatgagtgagaatatgcggtgtttggtgttttgtttttgcgatagtttattaagaatgatgatttttaattttattcgtgtttttataaaggatatgaatttatttttttttatggttgtatagtattttatggtgtatatgtgttatatttttttaatttagtttattattgttggatatttgggttggttttaagtttttattattgtgaatagtgtcgtaataaatatacgtgtgtatgtgtttttatagtagtatgatttatagttttttgggtatatatttagtaatgggatggttgggttaaatggtatttttagttttagatttttgaggaatcgttatattgatttttataatggttgaattagtttatagttttattaatagtgtaaaagtgtttttatttttttatattttttttagtatttgttgttttttgattttttaatgattgttattttaattggtgtgagatggtattttattgggttttgatttgtatttttttgatggttagtgatggtgagtatttttttatgtgttttttggttgtataaatgtttttttttgagaagtgtttgtttatgtttttcgtttatttttttatggggttgtttgttttttttttgtaaatttgtttgagtttattgtatattttggatattagttttttgttagatgagtaggttgcgaaaatttttttttattttgtaggttgtttgtttattttggtggtagttttttttgttgtgtagaagttttttaatttaattagattttatttgttaattttggtttttgttgttattgtttggtgttttagatatgaagttttttataaattttttaaatttttttatttttttgtaatagtatttagtttaaaacgttaatatattatatagttttataaaaatatttttttttatatttttattttagaagtttatttttatttaattatttttattttttaattttttttggtaaaaataaagatatatattagtataggttgatatagggttaagattaataatattaattatttttagtttttatattttgttttattggaagatttttaggtgtaataatacgtatggagttgtattttttatgataataatgtttttttttggaatattttttaaaggatttggttgaggttgttttaatttttttatatatatagaaggagtatattttaaaataataataaaaagtatagtaaatatataaaatatagtatagttatttattattattatgaagtattatgtattgtgtatagttgtatatgttagattttttataggattggtagtgtagtaggtttgttgatagtagtattattataaatatatgattaatgtattatattatgaggttatgatggttttaatgttattaggtgataggaattttttaggtttattaaatttttatgggacgatagttatatatgtaatttattattgatttaaatattattatataatgtatgattttataatatagtggggtgtgtgtgtgtgtgtttgtattttgtgtgtaagattaatattgaaattgaggtattaattaggtattaaggtaaaaatatattaattttttttgtgaggtgttaaattattttatgtagaatttgaaatgtaaacgattattggaggtttagaggttttcgggtttaaatcgttagagaatagtttattttaaatttattttttaatagtaaataagtataaaagttataaaaaatatataatgtagttgtgtagttataaaatagtaattagtataggattattattttttggagaatggaagtttttgaaagggagatttatatttttattagttttttttttagaagtatttgttaaaatataatgaagagaaatggaatttaagtagagaaaattagttttatcggtaaaggaaatagagattagagtttaggtttggtatattgattgggatttaggggtagggtgttgagggagggagttatagataagaaatttttaaaatttgtatttttgagttgtatatgttttagatgatattttaagaagtttattggagaatagttttttggagattgtatgttaagtagaaatgttataggttttatagtgtgaggagatgttggaattttagttttgtaaaatttgtgttgagatattaggatggggaagtcgtgtaagtgaggatcgtgattttggagtaagaattatattgaaatagatttattttagtaaaggttaaaattaagaggaagtagaattaaagtgggtttgatttttattaaaggtgattttttgataattatttaattgttaaattattattagtttttggaggaagataataaaatttagagtttttaaaatttattatgtagaatatgtgttatgttaagtagtagagagaatgtagtaattaaagaagaaataattaatagaagttaatttaaagatgatttgaatattgaagttagtaaataaggatattttttaaaatatttatgattaatatgttaaggaaaatagaggaaaagatgggtaaattattttaaaatttttagaaagattaattataagaagagagaaaatataaatgaatattatgagaagggatattataaaattgtagattttattaaaataaaaataagagaaagttagatataattttatggaaagagtttttaaaatttaggtatagtgatatgagtttttgaaaaagacggttgaataaagttaatagaaaattaagtagaaaatataaataattttatatttattaagaaattgagttttaaatatatttttttttattagagaaattttatgtttagatttttttatttgttaatttttttaaaaattttttaaaaggtatgttagttttatatagtttttttttggtattttttgggatgggttttagggtatttgtggatattaaaatttatggatgtttaggttttatatataaaatagtttagtatttgtttattagttatgtatatttttttatatattttaaattatttttagattatttataatttttaatgtaatgtaaatgatttgtaaatagttgttatattgtattgtttaggaaataatgataagaaaaatgtttatatatttttagtatagatataattattgtaggtatttttaattatagagtatatattagtaataatataatatttttaattttaaggttgttgaatttatagatgtggaatttatagatatgaaaggtagattgtgtgttatggtttggttgtttgtttatttaaattttattttgaattgtagttattataatttttacgcgttgttggagggattcgatgggagataatttaattatgggggtggttttttttatgttgtttttatgatagtgtgtttttataatattttatggttttataaggggttttttttgtttcggtttggtatttttttttgttgttgttatgtgaggaaggatgtgtttgtttttttttttgttatgattataagttttttgaggtttttttagttatgttgaattttgagttaattaaatttttttttttttaaattgtttagttttgagtatgtttttattagtagtatgataatagattaatatattgttttatattttttagataataaagagtaaatattttttaattaattttatgaggtaatataagttagataaggatttaaatatgataattatattataagaaaaataaatttattattaaaatgatttgatgaatatagttattaaaattttaattaaaatattagtaaatagaattaaataatatatgaaatggataatatataatgattaaatgggatttataagagaaatatatggtagatttaattttaaaatgttagaataatttattttaagaatagagaaaagtaggataatatgtggttatattaatagatgtaggaaaattatttgataaagtttagtaggtatttataataaaaattaaataaattagatataaaagggaatttttttaatagaatatagttatttataataaagaaatataaagaaatatttaaatttaaagttataattaatgaagaaatattaaatatttttttgaggtggggataagagaaggatgtttattattattatttttatttaatattgtattgtgtgtttaatagtaaaaatagattatataagatatatgattgttttttttaaggaaaatattatcgtgtatgaagaaaatttaagaagttttatgaatagattattaaaaataagtgaatttggtaaggttagtataaagtaaaaagtaatatttttatacgtgagtaataaatagtgagaagaattgatattttttaaatagttttatgtataatattataaagaaatataaattgtagaaataaatataaaagttatataaaattttattatttagaattataaaatattgttgagataaattaagtggatagttattttatatatatgaagaagataatattgttaagatatcgtttatttataaagtgatttatggagttaatgtaattgtaataaaatttttaatagttttttttgtgggaattgatatgttttttttaaaatgtatataaaaatgtgaggagtttaaaatagttagaataatattggaagagaatataattggaggatttaaattattagatattaatagatatttgaaagttatagtgattagaaaagtgaagtatttgtttagggataaataaataggaaaaaattattaaaatagagttttttttatttttttttatgagttttataatttagtttttatatgtaggtttttgatttattttgtgttgatttatatatatgttgtgaggtagggttttaatttttttgtttttttttttttgtagagatagtgtttgtgttatttaggttagagtgtagtggtgtaattagagtttatggtaattttgaatttttgggtttaagtaatttttttgttttagttttttaaaatgttgagattgtaggtggagttattatttttagttttttaattttattttttagaatgtgggtatttaggtgtttagttttattagatgaagagtgtatattttaatatattgagttgttttaatatttttattgaggttttttgtatatatttttttatgtgtttttgagttgttgtttagtgtttttttattttaatttgaatgatttatattagtattttttataggaaaaatttattggtaatggaattttttagttagttgttaattaattggaaatattttaattttttttttatttattttaatttattaattgtgataaaatgtatataatataaaatttattattttaattatttgtagtggtagtgtttagtagtgttaagaatatttatattgttttgtaaattaatttttagaattttttttatattgtaaaattgtatatttttatttttgaagaataagttttttagatatagaatttttggttgatagttttatttttgtagtattttaaatatgttatattattttgattttttttagtgttttttggtatgaaattggttgttaattttaatgaggattttttgtatatgatgtattatttgttttttgttgttgtttaagttttttttgtttttattttaatagtttggttataatgttttttggtttggatgtttttgagtttattttgtttggtagatttatagatttttattaattttggtaaggttttatttgttattttatatttttattttttttttttattttttttttattttgggaatttttattatgtatttgttagtttatttgatgttgtatagaggtgttatagtttttgattatttttttttatttttttttttttttgttttttagattgtataatcgtaattggtttatttttaatttgttggtttttttgtttgttaaattttgtatatattagttagtatggtagtgttttataagttttttaggttttgtttattattttttgtttttttttttatttttattttttaaagtttatgatttaagatgatttggtttcgagtttgttgatttttttttttatttgtttaagtttgttattgaatatttttaatgaatttttttttagtaattatatttttttttttagaattgttgtttttttattatatatatatatttttttttattttaatttttattttttttattgattatttttgggtgtttttcgtagagggggatttggtagggttataggataatagtggagggaaggttggtagataaataagtgaataaaggtgtttggtttttttaggtagaggattttgcggtttttcgtagtgtttgtgtttttgggtatttgagattagggagtggtgatgatttttaacgagtatgttgttttttaagtatttgtttaataaagtatattttgtatcgtttttaatttatttaattttgagtggatatagtatatgttttagagagtatagggttgggggtaaggttatcgattaataggattttaaggtagaagaatttattttagtatagaataaaatgaaaagttttttatgtttatttttttttatatagatacggtaattattcgattttttaattttttttttattttttttttttttttattttataaaatcgttattgttatttcggttcgtttttaatgagttgttgggtatattttttagacgaggtggtggttgggtagaggggttttttattttttagtaggggtggtcgggtagaggcgttttttatttttcggacggggtagttggtcgggcggggggttgatttttttattttttttttggatagggcggttggtcgggcggggggttgatttttttatttttttttcggacgtggggttgaatttttatttttttttcggatggggcggttggtcgggcggggggttgattttgttatttttttttcggacggggcgtttggtcgggcggggggttgatttttttatttttttttcggacgggtcggttggtttagtagaggggttttttattttttagtaggggcggttgggtagaggcgttttttatttttcggacggggcgtttggtcgggtagggggttgatttttttatttttttttcggagggggcggttggtcgggcggggtgttgatttttttatttttttttcggacgggtcggttggtcgggcggggggttgagttttttatttttttttcggacggggtggttggtttggtagaggggttttttattttttagtaggggcggttgggtagaggcgttttttatttttcggacggggtagttggttgggcggggagttgattttattttttttttagacggggcggttggtcgggcggggggttgattttttttatttttttttcggacgtggggttgatttttttatttttttttcggacggggcggttggttaggtagaggggttttttattttttagtaggggcggttgggtagaggcgttttttatttttcggacggggcggttggtcgggcggggggttgatttttttatttttttttcggatggggcggttgtcgggtagggggttgattatttttattttttttttggacggggtggttggttaggtagaggggttttttattttttagtaggggcggttgggtagaggcgttttttatttttcggacggggcgtttggtcgggcggggggttaatttttttatttttttttcggacggggcggttggtcgggcggggtgttgatttttttattttttttttagacgggtcggttggtcgggcggggggttgagttttttatttttttttcggacggggtggttggtttggtagaggggttttttattttttagtaggggtggttgggtagaggcgttttttatttttcggacggggcggttggttgggcggggagttgattttattttttttttagacggggtagttggtcgggcggggggttgatttttttatttttttttcggacgtggggttgatttttttatttttttttcggacgtggggttgatttttttatttttttttcggacggggcggttggtcgggcggggggttgatttttttatttttttttcggacggggcggttggttaggtagaggggttttttattttttagtaggggcggttgggtagaggcgttttttatttttcggacggggcggttggtcgggtggggggttgatttttttatttttttttcggatggggcggttgttgggcggggggttgatttttttatttttttttcggacggggcggttgtcgggcggagacgttttttattttttagacggggtggttgtcgggtagagggattttttattttttagatggggcggatgttgggcggagggtttttttattttttagacggggtagttgggtagagacgttttttattttttagacggggtcgcggtcgggtagaggcgttttttatattttagacggggcggcggggtagaggcgttttttatattttagacgatgggcggtcgggtagagacgttttttattttttagatgggatggttgtcgggaagaggcgttttttattttttagatgggatggcggtcgggtagagacgttttttattttttagattgggtagttaggtagaggggttttttacgttttagacgatgggcggttaggtagagacgttttttattttttagacggggtggtggtcgggtagaggttgtaatttcggtattttgggaggttaaggtaggcggttgggagatggaggttgtagcgagttgagattatattattgtattttagtttgggtattattgagtattgagtgaattagatttcgtttgtaatttcggtatttcgggaggttaaggttggtagattattcgcggttaggagttggagattagtttggttaatatagcgaaatttcgtttttattaaaaaagtacgaaaattagttaggcgtggtggcgcgcgtttgtaatcgtaggtattcggtcggttgaggtaggagaattaggtagggaggttgtagtgagtcgagatggtagtagtatagtttagtttcggttcggtattagagggagattatggaaagagagggagagggagatcgagagggagaggggagaggggagaggggagaggggagaggggagaggtagaggtagaggtagaggtagagtaggaatttagatttttttttttttttatatttttaatgagtttttatttggtgagatattgtttttttggtttttttatatatatatatatatatatatatatatatatatatatatgtgtatatatatatatatatatatatatatatatatatatatatgtgtgtatatatatatatatatatatatatatatatatatatatgtgtatatatatatatatatatatatatatatttatatatataaagagagagtttacggttttttttatttatttgagtatatttaaattattggtttaaagttttggtttagtaagtttaatgatttggtttttttagggataggttttgttgatgtatttttttttgtaaatgggttatttttttaaatttttaaatattttaagaattttcgttgaaaattgaatattttgaatataataatttagtaattttggatattatattttttttattttttagagttttttgttgttatttgaggatggagttgttttttagtgatttttttaaattattgttaagttgttttatgttatgtgtggttattaaaatttattttgttagttttatggttagttagtgatttgatagaggtttttttaaatagttggagttaaaaaaataaataattaatgtttttttaggttttgtagatggattttgagttgggatatttttttaatatttaattaggtagtttagacgtttattttaatttttattggttgtttatttggaggttaaagattatttagaggtaaaagtttaaggttattttaggtttttttaaagagtgtgggtatttagggttaaatatttagtgtttagttttggttatgtatgtgatattttgatttttttagtatatgcgggatattttgaaagttatattgttttatgtatttttatttttagtttttatttttttaggttttttagtttgtttgttgttaatttatttattattttatgttttaggtatttgtgattagtatttgtttttaaatgtttttgataaatattgttatggagatttttttaattttaataaagttttaagaggagtgaagtaaagattagtttttaagttgatttttttgggggttattatatatgttaaaggatataaatataattttttgaaaagaaagtttattttgttttttttggtattaggaaattatattaggaatgtgggatatcgtttttatggttgttttatagttgagggtgtgggggtgggagtgagtaggtggttaaggaatagtggtatatgtttttttattaaaatttagagttttttttttattaagtattattttggttgttgtaaaaaaaaaaaaaaaaatttatagattttagagtatagaaaaatttaattttgatagtttttttttaggttaatagttgttttagttggggaatgtgttgttggagttttttattatttttggtgaaggtattatagttgttttttaataagattttaaaattatgaaaaaattttatgtatttatttatgtgtttattatttttggtgttttttattatatatttgtttttggtataattttttttttgtttgaaggattgaaatatttattatagttcgtgtttgttggttatgtatttttttattttttataagtttaaaatttttttttttatagatatttttagagtttgttaagtagtttgatgtaattattatatatggtatatatatattagtatattatatagtattttatgaatgtattattatatgttaattaaaattatatatatatatatgtttttaaaaggttttttttttggaaatagaatttagtttgatagtagttgttttttagaattttagcgatgttggttatttgttttttatttgtattgtttttaatgaaataattgttgttatttttattattttttttatgtgttgtgttttgtgttttttatttttgttttttgtttttttaattttttttttttttttggttttgaataaatacgtgttatttttatttataattataaagcgaatttaggaaataatttatagggagagtttgttgatgattggttatatatttttagaaatagttgtttatttttttttttataaaggttaatttttttagaatattattgtattgaagaatgttataaataattttatttgttatttggatttggtgttaagatacgtggttaagtattattttggatgatttttttaggatgttttttggatatgattaatatataaattgttatattttgagtaaagtagattgatttttataatgtggataggttttatttaatttattgaaggtgtaaattgaatgaaatattgattttttttaagtaagatggaattttgttttgggatttgaattgtagtattagttatttgatttataaagagttggttggtttgtgtatagtatttgtaagatgaatggataatattttgtttggaagtttatttttttgattaaagaagataaaaatagaatagtttttgtgggttgaattgtagggtgtttttttagtagtgatggaagaattgaataatgataaaagtttttatgttttagttttattgatttatgggtagtgattgatggtttggttatataattaattaagaaagtagtggaaaattggtttatgaaaagaatgtttatatgagatatagttttatggaaattattatggtaatttgaggggtgtattaacgtaagatatgttgatgtttgatatagattggatgttgtttttatttaaattttatgtcgagatgtaatttttagtgttggagttggggtttggtgggagatgatttaattatggggtggttttttatgaatggtttagtattatttttttagtgttgtttaatatttattagaataatttttttttaggtttggaaggtgattgaaattaataagtatttatttttaagtgtttgttaggtgtatttgtagttttagttatgagagtgtttgaggtagaaggatattttgagtataggtatttgggtttagtttgagaaatatttgagtttagtttgggaaatatattaagattatattttaaaaaaatttatatttgtttgtgaagattatcggggtttacgaaataagtagatattgaggttgtagtaatgtagagatgggttgaattaagatatattttttttgtattttttatttttaataagtataaaatatttagtaaaattgttttttttaataagattgggtatagtggtttatatttgtaattttagtattttggtaggttaaggtgggtagattatttgagattaggagtttgagattagtttggttaatatggcgaaattttgttttaattaaaattatattaattagttaggtatggtggtgtacgtttgtaattttagttatttaggaaattgaggtaggataatggtttgaatttgggaggtagaggttgtagtgagtcgagatggcgttattatattgtatttagggtaatagagtaagattgtgttttaaaagaagaaaaaaaaagaagtattttttttaataagaaaagagatagagatagagattaaaaaaaaaaaaaaaaaaacgtgaatgggaggtattgttattatgtggattattgagttatattatattaggaaatatatttgtttagaatgtttaataatggttagagaaatttgttttttagaagaagagttttagagagaattaaaatagttatttgaaatattgagtgtataaattaggagcggggagatataagtatgaagggcgggtttatatatttttatgagtgtgttcgtttttgatatgagtgtggataaaggaatgtttttattagagagtgttttttttttttttgttggattagggaaaggtgttggtgtgattttatatataatttttttttaaaaaataataaataaataaataaataaaaataattttttttaaggttagaagatattagaattatgattatattttattttaatttgttttttttatatttgatgtagtggttttaggattagggatgtaaataaaagtttaggtataggaattatttttgagtaagaaatcgttaatatatttaaaaattattatgtaagattgtttaagggtttggagtagatgtgtttttattgtatttggtaaagttggagttaatattgaatgtagttgtattgtttggaagttagatagttaattagttttttgtttgaataattttaatttttatgaattggaatggattgatgggagatattcgttgttattagtatggtatagttttttgtataggttagtatagtaggaaaatttaatgttttttttaaaatgagaaatatttggtataaatgtagaagaggaagaatagtagttgaggtgaaatgaatgaataaatggggtatgtaatgaggaaaatttaatataatatgatttttttaaaagaggtataaacgaatgatgatattgttttttattttatttttattagatgtttgaaaggttgaagttatatgttgttgagattattgttatttttggattgtaatgggcgaattgataatgattaaataggattttggtaatgggttagtatttttttattgttatgatttttttgttataggagatttgtggttggttaagtaaaggggtttatatttataattttattattttgagaggttatggtgggaagattgtttttgaggttaatagttgtagaatagtttggggtatataatgagattgtatttttataaaatatttaaaaattagttagttatggtggtgtgtatttatagtgttagttgtttaggagatttgaggcggaaggattatttgagtttaagaatttgaggttatagtgagttatgattgtgttattgtattttattttgggtaatagagtaagatattgtttttaaaataaaataataaataaataaatagaaattataagaagaaataatgtggttaaagattaggaagtgatttgtgatttaataaatatatttggtttttgtttttagtttttgataggtaggttttaaaacgtttgtagttttttagtgataagtatgattttaatatggtaatgagatgattatggggtgaggggtttttagatagttttaggatggaggttgtttgttagaaatattagttgtgattagaggattggaatttttattgttatttttattttttggggaagaaaagggggttggaagttgagtttagttattaatggttaatgattttattaattttgtttatataatgaaatttttatagatatttttagatagtgagttttggagaattttttagttggtgagtatattcgtatgtttacgtgttgggaggacggtatattttatttttatagagatagaggtttttgcgtttatatttttttgtaaggtagatatttttgtttttaggagggatttagggtggattgtggattttttttttggggtaaataaaaatgtagaattagaaaatttaggtattttgtattttttatgggatattttagtagtatttacgtgattattttgagaatggataggatatttgaggtggggaagggagtatagaatttagatattagtttggatataggtatttgggataattttttattttttggaaagttttagtatttgagggaggaatagttatttttggttttgatttgagtggagatcgagggatttagaagagttggaattagatttttatatatattgagtatgagttagagaataaggtttgagagaaaaagttatagtgtttaagattgttgtaggggttaaaggggattgttgattagtgttttagggatttgttttagattaatttgagttatggaaaaattgttttttttttgtttttaaataaatatttgtaaagataaaagattatataaatttttaggtgtataatttttttagatttaaagaaaaaataattttcgtttttttttttatttttaggagaagtttattttgtggtattaagttgtttgggtgagtttttttttagaagagtttagggggataggtaaggaatgggaggtaggaagtttagtttagggagggggattttgggatgaaaagtgaagggagagggattgagtttatgttgagggtttttttttggttttttagatagtttcggggttaagattcggggagatattgagatagagcgtttgatataaaagaagggggtaagagttaagttttagggttcggagtttggttttttgggttttaggtttcgagggcggtgtttgggatgggtcggtttagttttggggtttttcgagtttcgtttttttttttttattttttttaatttgtgttaggtttttttatttggatatttatgatgcggttttagtttttatttttattgggtgttgggtttttagattagttaattagtgtcgtcgcggtttttggttttaaagttttcgtcggtttatcgggatttagattttttttagacgttaaggttgcgggttatggagtttcgaattttttttttgttgttttcgggagtcgtggttttgatttagatttgggtaggtgagtgcggggtcgggagggaaaaggtttttgcgggaaggagcgaggggttcgttcggaggagtaaatttgtatatatatttaattatagattataattataattaaggtagaaatgattttatttttatattataattttggaaaaggtaatagattgagatgtaagtgtgtttttaagtgatgggtagaaggagagaaggtgttttggatgtattttagaatataggtaatttaaggagagttgattaaggtcgtggaagagttttttagttattattggttattaaaggagttttttgtgttttaggaatggttttgttttggtgtttttggtgtgatttattattcgttgggaatagtttgagagaagtagggtttttgtattaatgttgttgaggatgttagagtataggaacgaggttttgggaaattatttggaaatgcgattgaaatttttttttttgaggggtttgggtttttggaaattaaatttttttaggttgggtggttggacgattttttttatatttataatgggataaggggaattaggaggtttttaaggggatttttgggttttatacgaattttttttatttttattgtgtgatagtagttatgtttttttttggggattaggatttattatttgtgtttggagaggaggggatttttttttttattcgttggtttttggatatatattgtttaatttttttgtggtagttgtaatgtgtagtttaatgggtatttatttgtttttttttaagggtatttttttttagaatttaggattttttattttgtagagtgtggttttgggagagaagtgtaaaattttacgataggtgagttgaaggaatgggatatggagttatatttatttttattttttggtatttggatttacgtgttttttttattgagattatagaattgtagagatgtttttgatttttaaaatgtattatgttttgaaagatggtatttttttattcgtagagtgttttttgtaagttggcgttgagttgtgtttatagaagttttttttaatattttttatggttagtagtttttggttggtgtagatggtgataggattagtgggttttatagtatggttatattgtatttttttcgttgttaagtgggttttttacgaagatattgtacggagagtagtgttaagtttgtggattaggaatattaatagtttttagagagtggtgttggttgagggtttgagagtaggataggaaaatttatttatggaataggtgtttatttttgtgaagatgaatttttggtttttttaggatggaaggagtgtaatgtagttaattttttatttagggtttggttggttatttaaagaaatagagttttattagggaagattattgggtttaaatgttgatgagtaggatatttagaggtggtagtgtttggatttattttggtaggagggagttagtattgttggatttataggtagttttatttttgttattgtgtttgttttatttatgtatttattttattcggtttgggttgatttatggggaaggttggttaattttagtgtttttgtttggttgtttagggttattttaggtttgggtgttttttggggatgttaatatgggatttaggtttaatttataagaaatttttttattttatgatggatgttgttgggtatgtttaatgtatgattttatgagttatatagatgttaattcgtaggggtatttggaattatatggttgttttgtgttttatggttaagtattttattttattagggtttatagtaatatgttaaaagttgtttttaatatatttttttgttttggatggggtatatttttgtgttgtggatgatatggttttattttagaattttaggttttttattgtgatttttttattggtgtttggtttagttttattttaaattttattttattattggtatttttagtattagggggtttgaaggatggtgattgcgttatggtttggatttgttgtagtgtttttttttgtggaggttttatttaaagttggtatttttttatgttatttagagtgtgggttaaagtaatatatttatatgtagaatgtgatgttagaatttaaataggtttattaggtagtgtgtttttttttttgtatgaggatgtaagatgtaatagtttgttttttatattggaagggatatttttggatgtttttaattattagatttgtaaaattttattgtagtggttatttttgaatttttgtaaggtttatttatttttattttttggagagaagatgttttattaaagtttttagtgtatttttttttttttatttatttattttagttaatatgatgttgttaatgaaataaaggaatttaatattttatagtatatttaggttttttagattttttaagattgtattatagaggtttggggaattataatagttttgaggtaaattatgaattaaagtgttgtggattttatatgaattattttatatttatttttgtgtgtgtgtgtgtgaggtagagttttattttgttatttaggttggattataggtgtatattattatgtttggttaatgttttgtttttggttttggttttgtttttgttttgtttttggatagagttttattttttttgtttaggttggagtgcgatggtatgattttagtttatcgtaatgttcgttttttaggtttaagttattttttttttttagttttttaagtagttgagattagaggtatgtgttattacgttcggttaatttggtatttttagtagagagaggttttttttatgttggttaggttggtttcgaatttttagttttaggtgattcgtttttttttgttttttaaagtgttgggattataggtatgagttattatattcgggttatatttatttttaattggaatggaagggaatgtatttattatatttatagttgtatattgtgtgtttgaggttttattaatttgttttattagatatatttagttagtatgttagttgtaattaggatttttatttggttatatttggagtaattttatttattttttagtaattttatttattttttaggttttattaggtttatttgttaaattatatggagataataggtaattttaatattattttatattttttagttttttaatggtggtgttatttttatagtatttgtagtgttttttataagatttattttgggatatatgattatttttgatttggttagaatggaggtagttttagaggtttttttttggtttttagtataatgagagtttttattttatagattagggatgtagtgtgggggtgattttagttgttagggtattagtgttaattatgtattaggagaatggggagataattagggttgggtttgtggatttagtgattttatggtgagtcgtgatgtgtttaggtttatttcgtggttttcgtaatttttaatgtgagggggttatgatgatgttgtgggtttttgggtattaatgttattttatatttaaagttagtatttttttaagttttttttattttttttttttagggtatagtttttaaagtaaatggttgtaggtttttttgtataatggtttagggaattgatttagtatatatttgttatagggttgtagggtttttttttttaggaatatggatattttttttgttattgggttttgaatttgaagtttggttgagatttaggtattgagaatggattatgattttgtattggtttaaatatttttagttttttgttttttaatttttgtttttttattatagatattaagtagtgtttttgttggttgtttttttgttttgattttggaatattattttttattaattttatttataattgtaggtaggttaagttttttcggttgtttttttggggttgttatggtaatcgtgttttttggtttttgtaggttattgttattatttgttttttatttttttagggttatatttttttcgtggatattaatgagtttaattttgggatatttttttttattattatttttagtttttagagaataatataatgaaattttttagtgatgtaggtttttgttgttagtacgtttttgaggttttggtggaaggtgggttttttgggtttttttataaagtacggtttcggtgggtttttcggttttacgtaatgtttttattttataggttaaatttttttagttttattatttttttttttatatgtttcggggtaattaagttaggtttagtttgtgagatatcggtattatttttttttagtttatatggattattttagtagtgggtttgttttatgttttggggtttttgaaaaatttatgtgatacggttggttgtgtttttaattaaatttcgttttgaatttttacgtgttgtgggagggattaggagggaagtaattaaattatgggggtaggttttttttatgttgtttttatgatagtgaataagttttatgagatttgatggttttaaaaggagaaatttttttcgtttggtttttattttttttttatttgttgttacgtgagatatggtttttattttttgtcgtgattttgaggtttttttagttatatggaattgtgagtttattaaattttttttggtaaattgtttattttggggtatgtttttattagtaatatgaaatggattaatatattatggtttgagaaagtgtttttaagttaaaggatttttatttatttagtttgaaattttgtttttttgattaaatgtttttaaattttaattttagaagtgttttttaggattttatgtggatatgttagttagtttttgtaaagtttttgagtggaatttttgttgtattataagggtgaggtttttgtagtattttttagcgtaggaagtgggaattattattggaaaaggcgagttttttttgtatgtttagagggtattggagggtatttatttgataatgttgttttagtttgtagaattttatgtttttttattagggttttgattttttataataggtttgttttggttgaatgttaaatatttttggaggtttgtaatttttataatgatatttttagttattattttatattatttattttttcgttataggaaataagggtttttttatgagatattgtagaggttttatacgtagttagtgatagttgttagaattttttagatttttattttttttttatagggtattaatatagttgagtagtaattagttagtttttttgttgtaggtttttttttttattttgttattattgtgtagaggtttttattatattatttgttatagtattcgggaattagggtatttttttaggttcgtgttggggatatttatagtagtttagttgtattttgtgttatggattttttttgtttttaattaacgtggatggtattttcggtttgttaggtagtgggtaagtttagttttaattttcgtttttgtttgtgtttatggattatttttgaagttatttgtgttggttagtattttttgaggagtagattgtaatatagaattaaatgtgttaggatttattaggggaaatagttatgaaagaaattggggagtaagatagaaaagattgggaaagttataagattgtgacgtaagtggtttttttatttttattttttgagtaattttagtttattgtaatttttattttttaggtgtaagtgatttttatgttttagttttttaagtagttgggattatatgtatgtattattaaatttggtaaatttttgtttttgtagtagaggcgggtttttattatgttagttaggtcggttttaaatttttgattttatgtgatttgtttattttggttttttaaagtgttgggattataggcgtgagttattgtgtttaattagattgtaatgtaagtttaaattttagtgaaggagagagggaaggaagtttggttgaaagtattttagatttagtgtaggttaagagaagtttagtaagggtgagttttggagttttagtgggtttttaaaggagggataattttgtttttgttttttttttttttttaattattgaatcgaagaagttaatggtaagtatggtttgagagtaaacgtagtaatagattttaggcggtaatagttggagtattattagttgtgttttttttagttgaggggttgggatgtgtatttttaagattgttataataatttagtggggagaaaggataaagggtaatgattaaagagaaaaaaaggtatgaattgatgaattgatatttttaagtagatgagaaggatgatgtttgggatattagtagagggattggttttggttgggagcgggaaggttaatttataataattatttatgtggtagaagatttagtatgtagtgtagttgtaaatgtatgagtagatggaatttgtgaaattgttttttagtgtgtttagtttttttagtgaagtaggaagtaaggttattagttgaagtaagaatgtagatagaaggttggatgtgtgagtagagagaaggtgtgtgagagttatttagattagtaggaggttgagggtgagttatgtttggagagggtgattgttggtcgtggtggggggtttttatgaggtttgggttatgaagttagagagagaagttagtatgttgtgtgttgttttttagttttttttagtttatgggggtaggtgtagtgtaggtagaggtggattttattagttgtgtagttttgttaaataagtatggtaacgtaagggaggggtaagggagggatggaaattatttataatagaatttaaaatggttgaagagggaggagaggatattaagggtgagggatagtgagtagatggtaggattattggattgggaattttagagtgggtggaaggattgttggaattgatgtattatagggaagattttaagtttggaaagtaggtatataggtaatgagtggtttattgatattacgttatagtatatgataaaatgatagtataagtatttttagagtttgtggttttcgtgtaaggggatgagtggaaagatggttagagaatggaaagtgtgagatagagagtatggaagggttggggtttttggttatgatgagatttaggattttttaggggagaataataataaagtaataggattttggtgttagggatagattatggttatggcgggatgatagtagtttttttacgaaataatgtttatatgataagggtatgagatttaggtagagagaggagaaggttatggaggagaggagttttagtatttgagaagttagagggcgatgtattttttttgttttatgggtgtttattgttgttataaaaattaatataaaataagtggttttaaatagtatttttttattatgttatagttatgtgtgttataattttaatagttttatggggttaaaattaaggtaaggggaggtttgtgttttttttgattttgaggaaaaatttattgttaagtttatttaggtttttgtttgaatttatttttttgtagataggattgagatttttatttttttgttggtttttgtttaggggttatttttagtttttagagtttttttttagttttttatatatattttatgtaatatatttaatttttttgtttggaatttttgattttttttttttgcggtgttttttttgttttttttttttgtagtatttgattttagttagagtagtttttttgtttttaatggtttgtgagatttgatcgggtttatatagatagtttaaaataattttgtaattttaaggtttttaatttttattatattagtatttttttttttgttatgtaatgtaatttattcgtgggtgtttaggattgagattggatgtttttgggaattattattcggtttattatatttgagtatgttgaagttatcgaggattaaggagatagtattgttggagagggcgatagtgaattaggaattataagagttaggattgagaggaacggtttggggtttatagggaatggttgtaatgaggggagtggggtttgaatttgatgatagttttgggggtttaggaaggaaggaggtagaaaggtttgagaattatagtgaggagtgaggatgttattttatttttgggttaagggtataaggtttttgtgtaaatttttttatgtgggaggattttggaagggattatattttttggtagatatagatatcgttggagttgtgaggtttaggaatattttgagataggatgtggaggttttgttgattatgggttgagaattttaaggggtatagcgggaagatttttggatttgggaatggggtatggggagataaaataggggtgtgtagagttttgtggggatgtgaatgtagggtgtttgggggatttagtgtgattgatataaatagggaaaaggtatgatgagtttagttttggtggatttaaggtagatgatggtgttgaggttgtgggagacgagggaggaggtttaggggtggtttttatttgggttttgtttatggaggtgaggatagtgagatagttgggttttagtgttgtgtggatttttttttgtttttttgatgattggatggagggtttggaggaagaggggttttagaggatttatttatgtttttgggggagggggatttattttaggttttaggtttgtattgatatatttgtttgtggtttggggttgtttgttataaattattgggggttcgtttattttggagttataatttaaggtagaaatttagatggtttaaatgttttttttatgaagtaatgttattagcgtataatttagattgttttgtaagagttttatttgttgtttttttaaatgtttgttaatattgtttgaaaatttataaatgtgataaatgtatttttaaagttaattggttgtaggttgtttaattttatatgtatagttttatatatgtataaaaatagtagtttgggttttttatattttaataattaagattttaagttgtgtatatattgtaatgtaagtatgcgttatgtataattttagtattaagagttaagagggaaagtattttttttttaatattttataaagtttttgtgttttttttttattgagtgggaataagttagttagtgaggaatatgaggtttttggttttatttaaagatattttagttattaattgtgagaagtattgattatcgggaaggtttttttgtttggtttttggatttttatattatggtagaggttatttttttttttagtgtagagtgatgttttaggtagtgatttggttagttattgtttattttcgggtagttttgttttttaagatattggtttttttttgaggatttttttgtttttagatgattaaaattggggttatttatttttttttgaattatttttgtttagtggtttgtggttgtgtttttagttataataggatatttttttagaatacgttgtaggaagtcgatatttttatataggtttatatatgtatagtgtgtgtacggagttttggttttagtttaggaagaatgggaggaggtttattagtttaatagagtttgagttttgtattagtgttatattttaggagttagagttataagggatataaagtgtttagatttattagagaaggtaaatttttatagtatgtagggttagataggggtaagaaataaggttattttgggttagtaagaagagggaaagggaaattatagttatattttagatatatgtaggtttggttttagattatggtaataaagtaagttatataaattttttagttttttagtgtatataaaagttatatttatatttgattgtagttttttaagtgtataatagtattatgtataaaatgaattatgtatatattttaatgtaaaattattttattgttaaaaaatgttaataattatttgaggttttagttaattttaatttttttgttgtggagggttttgttttaatgttaataattgttgattgattagaagggtggttgttgaaatcgttgtggtaattttttaaaataatataacgaagtttgtagtaagattattttttttatttggatatttagaggttattgtagggttattaatcggtttgtttttaatatttttgtgttttatagaatagggaaggtcgggagagagagagagagttaagaaattagttagttggtggagaagttataatatatataatatttattaataaggtttattattttataagggtgtgggttatggtgttttaaaatagttacgagagtaattttaaagattattgattataggttattatataggtgtaataatgaataaggttgaaatattttaagaattattaaaatgtgatatagagatatgaagtgagtatatgttgttggaaaaatggtgttaaatagatttgtttgatatagggttgttataaatattcggtttataaataaaaaagtaagaaaaaagaaagaaagatggaaagaaagaaaaagtaaaggaaaaaatgtagtgttagtaaatagtaataaaggaaagtatagtggaaggtgtatttgtaaaggggaaattagtattgaagtaaagttaggaaaagtttttaagttagatgggtttggatttgggtatgaattttttaggtttttttattagttagttgaagaggtttgagtatatttgatttagagttggtttcgatagatatttgtttagtgagtgagtgttgaatgaaattatttgagttagtttttttatttgtaaattagtgatataatttttgttttgtagagttttagaagaataagtgagaaaagatatagtgttaagagaaatagatataagatttgtggcgggttggatattagggttttaaagtaagttttgtttaaattggtaagaatattttttaggttaggaataggagttgttttggattttgtttggggttaggttgggagggagttgggggtggtagagtaggatgggggtaagggttgtggtagggtttggtattgaagtgaggttaaagtttggagagagtggtttttggtggtttttgggtagtttacgtaattttttgttttatttattgtgtgagttagcgttttttagaggagtagaattaataggatgtatgtatatatgtaagggagtttattaaggagaattgatttatacgattataaggtgaagttttacgatagatcgtttgtaagttgaggtgtaagaaagttagtgatggattagtttaagttttaaaattttaaaagtagggaagttgatagtgtagtttttagtttgtggttaaaggtgtttggttgtagattttaggataggatttttttgttttttgtagtgattttttatttcgtttgattatatttgtttaatttgatggtgttatcgagggttttgatgtagggaaggagttgtgtgttttgtgtgggaggatgttttttgtttttttagttgggttttaggttagggttatgagtttgagtagggagaggagatggaagggagatggttttggagtaaacgtttgtttttgttagtgtatttcgtaggtattattttatttattagtgttttggtaggattttatttatttaattttttttttggtggtagtttttggtggtgtttttttaggattttttgtttttagtcgtataaatttttaagaatggtacgtgggtataagggtgttgggaagtgttattttttagtgttgatttgagtgtgtgtgtgtggttgtatacgtgtgtgtatgtgtgtataagtgggaattggagtgtgtgtatacgtgtgtaagtgtgagtgtgagagtggagtatgaatgtgtaggtgtttataggtagtagttggggtgttagtgtttttatttttgtttgtttttttttttttttaaaacgtgattatatagtaatttagtgattatttagatttaagtttattaaatagaagggaaatataattaggatttttgtagtgtagggaagggaaatgtttagtttagttttttgattttttttttaatgggtttgagttgtaatatgggtgtagaagagttttttatagcgttattggtggtggaggaaatagttttttttattggtttatttttacgttgttgataaagatatattgggaagaaaaagaggtttaattggatttataattttatatggttggggaggttttagaattatggcggtaggtgaaaggtattttttatatggtagtggtaagagaaaatgaggaggaagtaaaagcggaaatttttgataaatttattagatttcgtgagattattataagaatattacgggaaaaattggttttagtgatttagttatttttttttgggttttttttataatatgtgggaattttgggagatattatttaagttgagattcgaatggggatatagttaaatcgtattattggatgagagtaattagattgatgttatgatgtatatgggtttatgggaatttgaaaaagttttttttttttatttagtttaataagataaataggaaaggaattttttttaagggaagatattgattttatttttgaaattaaattataagaaaataagaaatgtatgagatttaaattaagttatttgggtaaattgttttagaatttaaagtattagtagttataagttattagtattagtgacgatttttttattttatggtttagtttaacgagattggttagggtttgtcgtttgtttttcggtgttgttttggtattttgaaagtatttgtgattttgtgaattgtatttttagttgtttaataatttttttttgttgatttgagttagattttgtttttatggtttatatttaaataatttaagttattttaaaaaaataataataaattaagttatttatttatgagttatatagttttatgtggggaaagggaaggagagtgaggtaatatttaattttattatttgttatgtatttataagtgagatatttttttttaaagttatatttttggattagaataaattttggtatatttaagtaaattttttgaagaatgtgaatatcgtaagtaggtgagtgtattattttttgttttttttttatagagttgtggtttatttttttttattttgttttttgtattgggggtattatagagatagtacggtttgtgtttttgtattatttgtttttgtttgggtgtggatgataataggtatttgtaggagatgggagcgtggggggagaagtaatttagggtttttattttttttattttttttggatagttttgcggttttgtaattattgtcgttttttatttatagttataggtttgcggggttgtttttagtgaaagttatagattttcgtgagttttggaaattgtttttttttttttgtttttttaatttagagatggaaatagttttttgttattgattattttagggagttttagtattttttgtggtttttttaggtttgttagtatttttgtaatgtgtgttttttttttttgttattttttttttgttaggattttgattgttttatagaagaagtgataagaatttatttatgatatgataataatatatgtatttatggtgttaattcgatttgttttatagagatagcgttttgttatgttgtttaggttggtttttaatttttggttttaagtaatttttttgatttggttttttaaagtgttagtattataggtgtgagttattgtgtttagtttttaatttgaaaatttgatagtataataaaagaaaaaaatagaagtattttggaaatggaagaggaaagaaggttaaggtggaaattattaatttgtgttatttgagaagttttacgtgtagaggttgtttcgggattttaggggagaataaaaataaagtatttaggattttggtgttagggatagagtatggttacggcggaatggtagtggtttttttatgaaataatgtttataaatattttttgtgagaaggattagattaatatataaaaatatgttaaataaagtgaaatttaaggtaggagtgggattggttatttttagttcgcgatttttatggatttggagaaaggtttagtttggagatgtgtgaggttttcgatttggagtagtattcgtttttaaagattaggtataaattttagtatatggagggatttagataaatatataagagatgattatagtaggagttttattgagtatagagcgaggtcgtatattatttagtttttgtttttttatttgtttttttttttttatttgtttttgttttagtatagtagatttttagaatttaaaaagagaatttaatttttatgttttattaatggtttataatattttattatatttttagaaaatattatgtagaagataattgtagagtaagatatttatttagggtgagtgagttatagtggagatttgggagggagattttgtaatttttttattttaagaaaagaaaggtcgatttaaagaaggggattttaggtttggatattgggattatatgaaaggggttttggggtattaggggaatgggtttttttttttatattttttcggggttgtgtttgggaggatagtagttgggggaagaaaagtcggggtttatagagatataagggggttgagaattatttgtgttttgttttttgttggtttgtataaggtagtttttaaattgtggagaatatggtaatgattagatttcgtttagtcgtttttagtttttatatttagagtattatgggtagtttattattattttttatttttaaatttaaagattcgtatagtttaaagttgttttttggttttaatttttgttggtattaggttttaaggaagttgtgagtacgtttgtttgggattttgttattatttggagaatgataataaaggggatttagtagtttgtaggaggttgtatttgaggtaggattatgggatgggtgaggtataggattgtggttttattttttttatttgaggagttagagatgagttgtttttgttattttttttatggtgatatttttagagtatatttttgtgttgaaatttttatgaggaaagagatttgatgagatgttatggtgaagaggggttataagggttttgaatattaagttaattttgttattagttgagattaggaagtgaagtttaggatttaggagaggaggaggaggagataatataggattttgtgattatttttttggttatttgtgtatagtgagacgttttttttcggggttgggagtatttagtgttatggttttgagtgttgttattttgttgtttttatttgtgaatgtagttagattattttttttttttgatataaataatttggaggatttgttattagatattttatatttatatattaataaattttgtacggtggtttggtttaatgttttatatgttataagaaataagtaaaatatagggatgatatttttagtaaaggtattttagggtatatgagaattagatttttagggttttgtgtattttattttgttgtttaaagtttttatggaggattagtggagtgtagagtttagaaattattttgaaggttgaagttttttggtgaaaaggatttttttttgtattttggggtttagagggaataataaagtttttttttagggtttttagtttttggtttatattgttagtttgtattttgttggtttttttggttgttaatattttagtttttagtagtttttttttttattttttattttttttgattgggtgcgaatggtaattagattaggtagtgttttttttgttagtttgtttgtttgtttggtttttttttagagtttgtgtttttattcggtttattatttttagttttagtaggaatagggagaagtgatttggtaaatgttttatttaaaatgggattttttaattagagattatttgtgaaagttagttttttttgattaaagaaataggatatttattttgttagaagttgatgtttgttagagatttttatttgggaaatgttggtttatggtagggttttttttttagtaaagggaaaaatttttggttaattgatagttaataagttatttagaatttagtttatgtaaaaggattatttatttaaaggattaattttattataataaggatatatattttatatcgtatatttaatgttatttgtgagattgttttgattcgtttatgtagaatgttattttgttgttttgtagagaggtttgttatatattttaaatttttgttttttattttatattatttggtttatgaggtgaaggtgatgagaagtgtttttagataatatttcgaggtttgtttattagagttatagttatatattatatatagagattatttttttagaagttgtaatttattgatatgtattttatttatggtatagatagatattatttaataattcgtttttattatttttatattatattgtttaggtagttattattggtatttttgtatttttttttttgtatgtgatattaatgtataagattgtatgtatatggtggtttggtttttaggaattgttgattaggtaatttagattattttttttattgagtataatgggaaaaggaggaaaatatatatatttgaaaaatttggttgagtaaatggatgggttaataaagtagtgaagatttgtttggttaggaattaggagaggggagaaatttagaagagtaatttgagttgtggggttgtttttgtggattagaggtagtaatatttgttttttggttagaagttaatttttaggatttaggatttagaatttagaatttagacggttttttggtttttttagaatttagtgtttatttagatcgggttaagatttttatatttaatggttggaggatttaagtttatggtatgattgtttttggagtattttatgttagagagattttaataggtgtaggtaaatggtttagagggtattagtcgggtttttatggaattttgtgtaaggtatttttttgtgttgttatttatgttggttatgttttcgggaatttagtggaacggttatgtcgttttgagtggaagtgaggacggtgaggtggtttttgggtagttagagattttgtgtttttgcgttttttttttttattttaattagagattatttgtgaaagtttaagaataaatgttattaaatgtttgaggcgaatttaagattatcgatttattgcgtttaggagttttgggttatgtagtttagtagtagtgaggtttgtgaggttttggttatttttaaagtgttgttttaagaggagttgtcgttcgttgttattaggtattttaggagttggatatggtatttattataatttttgatgaggaattagagaggttttatagtatatagattttgattaaattgggttatggtggagttaggtaaaattttgtaatgatttataggtatttaagtataaaataaagttttaatttagagtatttattagagttttaggtttagtagttatttttttatgttgttgttgtgtttgtattgtgataattggtgtttgaagggaggatatatagttatatgttgcgggaaaatatatgttattagaaaatttggtatgatttagggattattgttttttttatggtagatgtgggattttttgttatttttattttgttgttttaagtgtagaagagagagtttttttttgtttttagttgcgtgattgataacggaagttggaatttagagaattagtggtagtttttgtttttttaggttttaattttgtaggtttaaggaatggatttaggtttttggtattttgtttttaatatatatttttttttatttatttagaaaaaaaataataataatagaaaatgaattaaaggttgtaatttttatggtatttagagaattggagtacggattaaggttgttatatgtttgttattgttttattatattcggttgtcgtgtgatttcgggagaagttttttattattagggatttttaaatttatttgtgaattttggataaatatagatatttcggtaattttattgaaatgaagtgaggattaatgagttgataggtggagaaaatttttttttttttttttttgagatagagttttgttttgttatttaggttggagtgtagtggagcgatttcggtttattgaaagttttattttttgggtttatgttatttttttgttttagtttatcgagtagttgggattataggcgtttattattatattcggttaattttttgtatttttagtggagacggggttttattatgttagttaggatggtttcgattttttgatttcgtgattcgttcgttttggttttttaaagtgttgggattataagcgtgagttttcgcgttcggtcgtagaaatagaaaaatttaggtgatggtttttatttttagatagggtttttttaggaatatgtattttaaaagtaggaggaaaatataatgttagtaatattttgtttaaaagtttttttagtgatgataattattatttatttttttataaaagtatagtaagattttttattttaatattttaaattagttaaatatattttttgattatatattagtgtggatttatatgttttgttttaagtgaaaatgaaaaggaatgagaatatttttatttttgtgtggtgattatgggattacggaggtttggaagttagtttatatttgtttaaattttatattatttgttattgttaatttttaatttattcgttttatgttttggaattttatataatttatatttttgaaaaattttatttttatatgtagggtagggtagaaaaggtgatatttttgttttaatttgttaagatttttataataaagtggtatagattgggtaagttaaatagtagaaatgtattattttttagttttggaggttataggtttacgatggaatgtattgtagggttgattgtttttgaggtttgtttttggtttatagatggttattttttttttttattttgttaatattggttttaaaatatgtgtatagggatatagtttagtttataagagtttgcgttatttttggcggtgtatattataagaaataaaagagaatataattttttggttggattttgttgatattttgaaatgttggttttgtaataagaatattattaaaggttaggcgtagtggtttacgtttgtaattttagtattttaggaggtcgaggcgggcggattacgaggttaggagatcgagattattttggttaatacggtgaaattttttttttattaaaaatataaaaagaaaaattagttaggcgtggtggtgggtgtttgtagttttagttgtttcggaggttgaggcgggagaatggtgtgaatttaggaggtagagtttgtagtgagttaagatttcgttattgtattttagtttgggtaatagattaagattttattttaaaaaaaaaaaaaaaaaaaaaaaaagaatattattaaaataagggagtcgaagtttagttttttttggaaagtgagtattttttgagtttggtcgttttagggtagtaagatttagtgttatgtagttttttaaagttttatttattttagtgattttgattttgtatttttaattgggaaaaggatttttttttaggaaagtaattatttttgatgttatttaggtattattttttttatatttataggagaaaaaattgatgttaatgaataggaaatatttgttaaattattatataaataatttttgtattattttaaaatattttttattgtattgagtttgttggtattttaataaaaattattggtatataatatttatatatattttggggtatatataatatttttatgtatgtgtagaatgtgaaatgattgagttaggatatttaggatatttattattttaagtatttattagttatttgtgttgggtgaattttaaatttatttttatagttattgtgaaatatataatatattgttgttaattatagttagtttgttgtgttatcgaatattagaatttattttttttatttaattgtatttttgtatttattaagttatttcgttttattttttagattttttatatattttttttagtttttggtaattattattttgttttttatttttataagattaatttttttttagtttttatatgtgagtgagaatatgtgatatttgtttttttttgtttggtttattttatttaatatattgatttttagttttatttatgttgttgttagttattatgaggtagttttagttggaagaatagagaattaaaagaaatttttgtgaagtttttatttaggtttgttaatttgtaatattttaatattattggttatatgtagtatatatagaaaataatagaaatatatgtagatagttttgattttttatagttttgttatgtatgtgtttttattgaaatatatatagtatagtattttatgtattgtatagtattattgtattgagtattggattgttagtggggagaggcggatgttttgaatttggtgaatgtttttatattgttataaagtgtttttttttttttggttgtttgttttgagacggagtttcgttttgtcgtttaggttggagtgtagtggcgcgatttcggttcgttgtaagtttcgtttttcgggtttacgttatttttttattttagttttttaagtagttgggattataggagtttattattacgatcggttaatttttttgtatttttagtagagacggggttttattgtgttagttagggtggtttcggttttttgatttcgtgattcgttcgttttagttttttaatgtgttggcgtgagttatcgcgttcgggttataaagttttttaaattttttcgtttgatatgattttagattttgtaaaaattgttttttgttgaatgtattattttgtggtttgttttatcgtttaatatggtttatgaggtgaatttatatatttatagaaatagtttatttgtttttagtgttggatagtatttatgagaggaatattttataatttatttttttttttgttagcgatttttagtttgtttttgttatagatattgttataatgaatattttgggttatttttttttggttttttgtgtgagttttttaagatacggatgtaggaatgggattattgtgtttttattatgtgatgttataggatgttaaattgttttttgaagaggttgtattaatttttttttttaaaattttttttgatattttataggttaagttatttttttttttaattagttgtttcgttttagtttttttttattggttttttttgttgtagatgttggagtattgtggggttttattgttttttaattattttagtgttttttatttttaggattttaaatatcgtttagatatagatggtttttaaatatatatttttatatatttttataattaaaaaattaatggtattaaaataggtattttgatatattgtagatgggtttgtaaattggaaatgtttttaggaaaggtagtacggtaatttttgtttaaattaaaaatgtatatatttagtagttttatttttagaaatgtgtttaaaaatatatttgtatttttgaaaaatgattgtatttagaattatatgttgtaattttgtttgtaaaattaaaaaggaaagaagaaagaaaatgaaagataaaagaaaaaataatttaaatatttgttattagcggattagttaaaaaagtattgtaagttgggtatagtagtatttatttgtgaatatattttattttattttgggtaatatgaggaggtttttttatttttttaagaaaatttaaataagtattgtatatttatacggtagagtttataaatatttaatataaaagaagaaagatataggaaatttttgatatttttttatgggatggtttttatgatatattgttaagaagaaataaagtaaggtgtagaataatatatagagtttgttaaaatttgtgtgaaaagggataaagagatatatatatatatttatatttgtttgtatatgtataaaatatatttggaagaataagtaagaagatatttttggttgtttgttggggatgagatagggtaagaaagagatattttattttttgaatattttgaattttgaattttgaattatattaagaaataaaagataatttttagggtaattaaataaattttaaaaaaatttaaaatgaaaaattttttaaaaattaatagaatttttttatttttattaaaataaattttaaaaattttttaaatattatattatttttttaataaggaggtttatcgttattttaatttagtacgttgttttttttttaattgtatgatttttttttatatttattttttttttattataaggtaaaataatagtatgattaattaaatgtagtttgtttggtgaaggaaattttgtttaaattttggtttaagtgggaaagggattttaggggatttagtgtagtagttatgggttttagtatgtttacgacgttttttagtgtttgtgtgggtttatggatgttatatttagaaaatattggaatttttaagtatacgtgattgaagttatttgttaaatgtttaaggttttattaatggtttatttgagtatttgttatacgcggttattttatttttggattagaaggtatatttagagtttttagtgttatattttaggtttaatttgttgagattagtcgaggaaggtttggaggttagtgtcgtgaggggtgggaagattgagggtgtgggggttagttgtggagtggcgggagttttaggtgttgtatgaagtcgagtttttggattattttgtgattttatatttggtttttttttgggtgttttttatttttaggatttttaggaaataaaatgttgtaagattggggtggggagttgtttagggtgggttaggtgtggttttattgattttatatttttgttttttagtttatttttagtttttttttgatattagaaattaatatagattgttttagggtggtggtttttaaagtgtggttttgggggaagtagtattggtattatttgggaatttagatatgtaatttttagggtttggtttggatttattgtattagaaattttgtatttaataagtttttagtagaattttgttttttaaattagatttttttttttttttttttttttttttttttttgttttaagttttaatattgagtagttgtgatttttggatagttaggtgttagatatttttttttgttaggaggtattaggttttttaattagtttagttttatttttggtttggtttagggaaagatgtttattttttggattttgagtaaagtttttttattttgggtgtttgtggggtttttatttatattataaaataaagtttaaataatatttttttttttatgagatttttggtatttttttattagttagagttgaagatttatatatatgtttattaagtaagtgtgtatgttttattagttagtttgttagttttgttaatgtattataacgtagtagttttttagtttttttttgtgaggtgttatttggagttttttgttttattattaagagaattaaggagcgtggatataaagggtgaggttggagtaaaagtttaataagtaaaagaagaaagtttttttttacggagagggggtttggaagatggttgttatttttatagttgaatgtaaaggtttttataagaaattgatgagggttgggtgttttatttgtataaggtataaattttcggtagttttattttatttttttagtgtttatgtaggcgtttagtttgagttattttatattgttttgtttttttgattgtttatgtatcgggggatagaattttttattgcgggtatgtttggataagttttttgtgtagttttttttatttgtgtagttgtgggtatgttttaggtaagtttttttgtgtaagtttttttttttgtgtttgtaggtcgtttttttgtttgaaataatttaattgaggatttattataattgttcgtttgattagtttttttttttttttttttttaatttgtgttataatttttttattgatttttgtttgagtaagattgggtatgttttgagggtaaggagggtttatttttttttattttagttttagttttttttaaaataacgtttcgcgtatagtaggtatttgataaatgtttattaaatgaagggattgtttgtagtggtttggtagataggaaagtagaatgaaaatttataggttaaaagtggttgggaaaagattttttaaattttagtgttgggtatagggtttattgaaatttattttcggaatttttttatttgtttcgttttttttttattaggatagagtttatttagttatatattattttttaggattattttttagattagttaggtataaattttatcgattttttgtttgtggttttaaatgtttagttgaaattttgaggttaattttagtggagttagaggtttattttttaggagtggtaatggttggttttaagattcgagaagtagtgtttatattttaaaagagaagattgttttattagaaatgtagagttttggtatatgtaggttcggggtttttaggagataaagaatgatagttttaggagcgttgggattttcgtgtagttattagttattatagtttaggtaggggttgggtttttatttcggttttttttttgtacgttttggatgtggatggttttcgagtgtgaattcgtttgggttttgattttgggtgtttttttcgtcgttgtggagtttttgcgggtgtggtgtatgtatagggggttttataggagattcggggttttttagagttttaaggttaatatttttggagaatttatgttaggtatttaggtttttagggatttagatgtttaaattatgaaaatgagggaatttattttatttttttaggtgtggtgagatttttattatatgattatcggttatttatatatggattgtatttttagagttgtttttattagtcggttaatgtttaaaatttaaagatgggttaggtatggtggaggaagagttttttttttattttttgaaggtgttattaataggaatttttattttgtggagtttagaggagattttttttgaagttgagttgggaatggatatttggattttttttttttaagagttagtaatttcgtggagaattatatatttatttgtttattttaattttatagtaatattcgaggtggtttattgtaataaatttagtgtaataaatatatacgaattattttaaaattaatattaaggaaaatatatattttaaaagattaaggttggggtaaagttggaatattattaggcgggaaggaatatttgaaatatttgttgaaatggagttgattttttatttagttatagatttgttgttttataattttattgtatttgagtattagggaggggggtggtagtttaggttattagttttttgttttttgatttaggattagtgttttgttttatatttatagttaaagtaaattatatcgttgtaagatgtttaatgatgaagttaaagtttatagagttagtaagtaagtgtaaaaattttaggagtttaaggatagtttacgtttttttttagaaatggttttattatgtattgttgaagggagagggtttttttaaggggttttaagatgtaggagtaattgggttgtagttttaaataaagatgttttttttatttgtagattttataaaattttataggtaaatttggtgattttatttgagttaggaattcgattttttgatattggttttttttgagttattgtgtgagttttaaaatgtgatatggagattttgttatattggtatttttttgttggaatttgatatttatagtggttttggtttttttgtttggttttaggaggaaatggagtgttttatatttttttttagtatcgttttgtgtaagaaggattaggagatttggagttaggggtttttttaattttatttttttttataaaatagtgttttttaagttttttgggggtgagggttttgatatcgtgttgttttgatgaatataattgttttagttttcgaaataaaagtataggtgtataaaatatcgattgttgtaagtaatgttaaggtggggatgttttttaggtgttaggtttagtattttgattttgtatgtatatatataggggttaggcgttgtggtttatgttcgtaattttagtattttgggaggttgaggtatgagaattgtttgaagttagaagtttaagattagtatgagtaataaagtaagatttagtttttataaaaaaaaaaaaaaaaaagaaaagaaaagaaaaaaatatatatatatatatatatatatatatatattgggtgtggtggttttattttgtagttttagttattcgagaagttgaggtgggaggattgtttgaatttaggagttggagtttgtaatgagttgtgatcgggatattgttttagtttagtgagattttgttttaaaaataaataaataaaataaaataaaatatatatatatatatagttagagttagtattgagggagaggttggttttaggggtggggttataggtattttttaggttttttttagtggtttttgttttttttttttggaggtggaggagtttgtattttatgaggagaagttttttgaagaaggcgggagatatttaggagcggggtttagagagggaaaaggatgaggaagtggagataaagtggagggggtagggtaagaagggtatatgtgaggaatggggagggggaggattttttagttgttagaaaggttttacgtagaatttggtttttggtttttttgttttattaggatggatttgggaaattagttagagtgggagataaggagtttattttgtaaaggatacgtgtgagtttttttttagtttgaatttatgagtagtagttgatagttaggatttttgtgtggggcgcgtgacgtttttttgtaattagggcgttttttgtattttattagttattttttttgggattacgttggttttttttaattttaatagggagagaaggaaggagaggtttggaggttttgggttttttttcgtgttttttttttttttgttatttattttttgagtgtttttgattttttttcgttattcggattttattatagtaaagtatattttgtatattggtttggattttttttgtaattatttagtgtgtttattttgttgattgtttagataaagtcgatttattaaggtaggggaattataatagagaaagagtaatttatgtagagtcggtcgtgcgggagattagagttttattatttaaattagttttttcgaaaattttaattagtttttaaggataatttggtggatgggggggtcggtgaattaggagtgttgattggttggtttcggtatgaaattatagtgagtggaggttgtttttttaggttgagttagtttttgagtggggggttataggattggttggtaggtttagatggggttttttagttgttagaaatgtaaaaatttggtttggcgtggtggtttacgtttgtaattttagtattttgggagttcgaggcgggcggattacgaggttaggagatcgagattatttttgttaatacggtgaaatttcgtttttattaaaaatataaaaaaattagtcgggtatggtggcgggagtttgtagttttagttatttagtaggttgaggaaggagaatggcgtgaattcgggaggtagagtttgtagtgagtcgagatcgcgttattgtattttagtttgggcgatagagcgagatttcgttttaaaaaaaaaaaaaaaaaggaagaaaaagaaaaaagaaatgtaaaagatattttaaaaggtcgttttgaggtttataatagtgatgttatttttaagagtaattggggaagttgtaaattttatgattttcggaataatggttggtaatatttagaattttagttttttttattttaatttaatggttggcggcgttttattcgttttaaaagaatattttttttttaaattataaatttttttttaaggttagtacggtttatgtttagaaatgaataagggtaggttagcggttagaaataagatagggtgagttaggtttgatgttttttattgttattatttttttatttataattttgtaaaggcggttttattttggttttagttttatttatgtagtaatattgtgttttgtttttttaattattgttattaggtgaaagtagagagagtatcgtttagatgggttagatttttataggtttattgttagaacgaatatttttgagattttagatttaagttagtttgatttttgaaagttttggatcgtttttaaaattaaattaatattttaggaataagatttgtttcgattttgtttttatttaaggacgttatggtaacgtagtttttaaacgtgttttgagaataaatggaatagggttttttgtgtttttatttatttgcgtttttttttttattatagttaatcgtttttgtaaatattgttatatatttttttattttattgaaaatattttttttaaatgtattttaagaaagatttaatgatatgaaaatatgaaggatttttttgaaagagtttttggtgttgggttttaaagaacgttttggtttttaaaattttgtaattattttggtgtggggtttagtttcgtatttttaaattgaaatatttttttttttaacgttcgtataaatttaagtttataatttttattattttaaaattttatttatttttgttttggggatagggtttttttttgttatttaggttggattgtaatggtataattatagtttattgtagtttggaattttttggtttaagcgatttttttgtttttaatttttaaagagttgagattataggtatgaattattgtaatttatttaaatttaagtttatattaaaagataaaattttaatattttagagaaaatgaaagttataaagttattttagtttttgaagttattgttaaaattttggtgaggaattttttaggtttttttttatttaaaatatatattaatattatgtaagtaatattagcggtatttttatttaggttggagtgtagtggtacgattttagtttattgtaatttttatttttcgggtttaagtaatttttttgttttagtttttcgagtagttgggattataggcgtcggttattatgtttggttaatttttgtatttttagtggagatagggttttattatattgattaggttgatttcgaatttttgattttaggtgatttgtttattttggttttttaaagttttgggattataggcgtgagttattgggtttagtttttttaattttttaaaaaaggttaaaagtatgttgggtatttttttttatagtaatatttaaaagcgattttattttttttaatgattgtatagaattttataatataatttttttttgggagataattgaaatgttttttatttttattgtggtagtggagatgtgggtgtgtataatagttaaaatttaataagttgaatattttaaatagatgtagtttattgtatgtaaagtatgttttaatatgatgatttaaaaatattatcgtttttgagatttgtattttgtttatgtgaaataaaataaaataaaaattttgtttttgtgtttaggagatatattttgatttatttggaggtagagggttatgttgtttgtaatttatttttataggttttgaaataataataatagtagtatatttatagatttagaaagagagaaagttatagtaaaaatgtttataagtaaaattagataaaggttaaaaataaataataaaattacgttttttaaattttattttttttttattttttttttttttttttttttttattttttttttttttttttaatacgtttttttatttttttttttttttattattttttgtatttgattttcggtgtattttagtttttaggttaatatattttatcgcgttcgtttggggtaggttagagaagggacgcgaggcggcgttgttatagtattttatgcgttttagcgttttgggtcgcgtaggttttttattattttagtggttattttcgtttttgacggggttatattcggggtgtaaattaggatttttattgaagcggcgggattttgagaggtttttttttggttttttagttgtgggtttttttgcgggcggtggagttcgtttttattagaatcgtttagaggcgggcgttgttttttaggggtgaagcgttttcggattttggaatttgtgggcggtttgcgggaggggttgaggcgtagttttttatttatttagattcgaatttatcgcggtgttgtttttagcgagttagattttagatcgcgttttagtttggattcggaatttttgtttcgcgggtttgtatttttatagcggtaggtgtgagtgtcgcgtagttggagattagaagtttgaggtagttcggttttttttagtttaaagtgtcgttatttcgtttttgtattagtaaatacgttttatttttcggagattagggaagggtgatgggtgattttagttttcgtagtgaatttcgggttataaaatttaaaacgtttgttggtaaagtcgtgcgcggtggtttaagtttgtaattttagtattttgggaggtcgaggcgggcggattatttgaggtcgggatttttagattagtttgattaatatagagaaatttcgtttttattaaaaatataaaattagtcgggggtggcgtatgtttgtaattttagttagtcgggaggttgaggtaggagatttatttgaattcgggaggcggaggttgttgtgagtcgagatcgcgttattgtattttagtttgggtaataagagcgaaatttcgttttaaaaaaaaataaaaaataaaaagttttcgggcgtcgagggtagtttcgttttgaattttgtgagcgttcgcgttgggtcgtttttttttttttttcggattttgtagtggcgtttaaagtttgcgaggaggaagtcgtttttgtgttcgtgagtttagggatttaaggtaagtgttgagggagaaaatatagttgatggggtagagtagagggggttggaggtggggtggagggggagggttttgaatagaagatttgggaggtttggtgggggaggggatttaggtttcggcgttgagaagtaatttttttggagtttaagatttttttggttttttttagtttaggggaggattggttttatgtttttttgaaatcgtttttaaatgttttagaataaattttaaatatttattattattattgaattattaaaagttttttttggaggcgagttgaatgagattttttgttggagttggtatacggaggaagttttggagggagggtagatatcgtggagggaagggtttgggatttgtgttaggagagttgggtttatttttttttttgttttaaattatgtttatgatttttagtagtgaaaataatttttttaaggtggggataggattttagtttttgttgtgtttaataaattatgaggattaaaataaattattagtgaatgtgtatgggaagattaagaaattgttaaagttttcgaatatattatatttttatttatagaaaagtgtaggttagggatgataggggaatagttagtaatgatagggatagttgaatttaaaaaaaaaggttgtgaggttaataaaaaagaaatggatatagtttttgattttggagggtttatagtttaatgggagaggagggtagaagatggtaggtgatggttgggtgtgtggtattcgtttcgtttgtagttttagttatttaagaggttgtggtgggaggattgtttgagtttaggtatttgaggttgtagtgagttataattacgttattgtattttaattgagtgatatagtaagattttttttttaaaaaaataaaataaaataaatgaaaaaaataagatttaagatagggtatagtcggtattattaggaaggtttaaattatgggttagattagtagttttaaaatttgattatatatcggaattacgtagggaattttaaaagatattaaggtttaggtttaatttaggtttattgatttaattggttgtggttgtggtttgggaatatggatattaaaaattttttaggtggttttacgtagtggttaggtttgaagattattgtttagatgttttaatgattaagaatgtgcgttggggataagttaatttttttagtagaggttttttagatagaatttttattattgagaattgagaatttatatgttatatataatttatcgttttaaagtgtatagattagtggtttttagtataattataaggttgtgttatcgttattattatttatttgggaagattttttttttttttttttttttttttttttttgaggcggagttttgttttgttgtttaggttggagtgtagtggcgtaattttagtttattgtaagtttcgtttttcgggttgattttatttttttgttttagttttttgagtagttgggattataggtattcgttattacgtttagttaagttttttgtatttttagtagagacggggttttattgtgttagtaggatgttttttattttttgatttcgtgatttgtttatttcgattttttaaagtgttgggattataggcgtgagttatcgtgttcggattttttttttttttttttttttttaaaggttagttaagtgaaatagtgggagtgaagatgaaataaaaatatttataattggttgtgattaattagttgtaaatattattgtatttagattagtttaattgggaagattttgaggatatgttgtggtttgatgggttttaaggtagaggtgatagtaatttggaagagggagattgtttaggtagtggtattttggtgggatagggtgaggagattttagagtttacgtttattgtaattttggggaaatgttattagagaaatgggggtggtgttagataatagattgtgggagttatggtttttatggtagagtagaagtatttattatgtgtgatatttagtagatggggcgttgtgggtggtttggagtattttggttgtaattgaggtaggtatagtgtttaggaagtttgtgtagtaatttagattgaagggaggggaaagtttagattaagattatggttgtgggattgaaatagcgttgaaggagttgattttgattttcggagatgaaggggaaagaggaaattagaagggattaaggatggtgaagtttttaagagaaattgaggaggaagagaggatgatgtggtgggagacgtgtagagagtttttgtagatttgttatattgaaggggattatggttttagaggtatagatgttttaaaataggttggaaaagggagtttggagagagtttggtgttgtaatgaattatggggagtcgtttcgttggttttgtgattatttaggaattgaatagagagggggttttgggagattttagatatttagaggatataagggggtgaaaggggggatttggttttgagtcgaagggaggagaaggagattatatagttgaaacgtttaagagaatttgtgatttgagcgtttttattggggtaagtgtttttgaaaggtagaggcggttgagatttggaaataggtttgtaaatttggttattggttttattgtagtaacgttgtgcgcggttgagggagtgtattggtagaaaaattacgcgttgtttgtttcggaaggaataagttagtgagagtcggtttgatgggaggatcgtcgaaaggggtttggtgaagttcgcgttttttgggggtgggaatgcggggatggggtggtcgcgatgtagggagggcgatagggtttaggtcgtgtttataagtttggagttgtatttttagttattcggggttggtttttgattttggttgcgttcgcgtacgtttttttttttttggtcgttaggtttcgttttttaaatttttttaggtttttaggtcgttagaatttttttttttgaacgtggtttcgttttttttatttatgattggttaagtttcgggttttagtttttattggataagcggtcgttgagcggggcgtaggtgattaaatttcgacggggtttttttatcggttttatttagttggttattgttgagtagttgagaaggtggcgacgtaggggttatggggttgggtcgggttttgttgtttttggtcgtcgtttttttttttgtattttcggtagtcgtcgttggtgagtggggtttttggcggttttcggcggagcgggagcggcggggcgttttcgggggttcgggtgggttgtcgcgagcgttgtgcggttagggcggggtttaggtgtgttgtttggagtgtagggagttggacgtcgtttgttttcgttatattttagttttgtttttttatttttcgttttttttttttttttttttttttttttttttgagacggagtttttgtcgtttaggttgtagtgtagtggcgcgatattggtttattgtaagtttcgtttttcgggtttacgttatttttttgttttagtttttttagtagttgggattataggcgttcgttattacgttcggttaattttttgtgtttttagtagagatggggttttatcgtgttagttaggatggtttcgattttttgatttcgtgattcgttcgtttcggttttttaaagtgttgggattataggcgtgagttatcgcgttcgatttttcgtttttttttagtttttttcgggatcgcgtattattcgtattttttggtttttttttgtatttgtttttttcgtttttttttcgtttttttttatttttcggataaattagtttttttgaggtttttgggttttcgggttgtttttgtgaatggtattggaaggtcgttttagcgcggtcgttgaggtagttatttttttcggtgttgggggcggattttaggtttttgaagttttgttttttttcggagtcgatgtgtttttagtttttgggtcgtagtttttggagttggggttttttttttttgggattcggaggtggtgttttttgttattgtgaggattgtggggggttttgatttttaagttgaggggttggagtttgtaggtttcgggtagaggattttttttgcgatttttgttatttttagtttatttttttttcgttttcggtttcgggggtttttttttttttcgtattttatttttattaatgattaatgatttaaggatattagatttttttttattttttttttgtttattttacggcgttttgggtttttttgtttttttagttttttgttatttttttttgtgtgttgttttttgatttatttttagagtgttttttgtttttatttttcgttttcgttattgaaggttttttttgttttttttatgggttttttttgtaagtagtttttatttcgtgttgtttttatgtttttttatttttaaatgtttttgattttaattttttggtgttgttttttgttcgggggggttttttttttattttatttttttttagatttttaaggagagttttgatgttaatggtagttgggttttaggtagggcgtagggtagcgtagatgtttttttttttttagtgtaggtgtttgttttgggttttgttttattgtggttttttttttatttttttatttttagttttatttttttgaggattttattttttagtttataggtgttggattatttttttttggttttttcgtttttttttattttgggattttgtgttgtttttattttttgtttagttgtttggggtttttagtaagtttttattttttagtgggaaagtgggagtgttggagtatatgatagtgttgagaattttttttaagttttatttttttttagagtattttttttttttgtttttattttattttaagtttttttatagttatttttgttttatgtttatgtcgttttttagtttttgttttgtttattttttttttttaatttagatttaaaataggttgttgggttagttgttttttgattttttttttttttttttggttttttgattttagtgggtttttattttttatatcgtatatttaaaatttgttttgtttgtttttggggtgttattgttttttttttagtattattttttttggtaggtttttttttaggttgagaatttttttttttattttggttttttttttttggttagtatttttattttttgttttgtttttaatttttaatttttgtttgggtacgtagtagatatgtatgtatatatttatggggtatatgggatattttgatataggtttataatatgttataattatattagggtaaatgggttatttattataataagtatttattttttttttgtgttataaataattttattatgtttttttagttatttttaaatgtataataaattattgttggttgtatttattttgttgtgttatttattagattttatttattttaattatatttttgtatttattaattattcgtatttttttattttttattattttttttagtttttggtaatcgttattttattgtttttttttatgaggtttattgttttaatttttggttgttataaataagtgagaatatgcgaagtttgtttttttgggtttggggtttattttattttatatgatgatttttagttttttgtaaatgatatggtggttgaatagtattttatatatacgtgtgtattatattttttttttttattcgtttgttgatggatatttaggtcgtttgtagattttggttattttgaatagtgttgtaataaatatggaaaagtagatagttttttaatatatcgatttttttttttttgggtatatgtttaatagtgggagtgttggagtatatgatagttttattatatttttagtttttggaagaatttttatattattttttatagtggttatattagtttacgtttttattaatagtgtataagggtttttttttgttatattttcgttaggattttttattgtttgttttttggataaaagttagtttatttggggtgggatgatatttcgtaggagttttgatttgtttttatttgatgacgaatgatgttgagtattttttgatatatttgtttgttatttgtatgtttttttttgagaaatgattatttagattttttgtttatttttaagttggattattagatattttttttatagagttgtttgagatttttatatgttttggttattaattttttgttagatgaatagtttgaaaatatttttttttatttttggatggtttttttattttgtttattgttttttttgttgtgtagaagttttttaatttgatatgattttatttatgtatttttattttggttgtttgtgtttgtggggtattatttaaaaaatttttgttagtttaatattttagagagtttttttaatgtttttttttatagtttttatagtttgaggttatagatttatatttttaattttttttgattggatttttatatgtggtgagagatagggtttagttttatttttttgtataaggatatttagtttttttagtattatttattgaagagatttttttttgttttgtatgtgtttttggtaattttgttagaaataattttattgtagatatatggatttgtttttgggttttttattttgttttattggttcgtgtgtttgtttttatgttattatcgtgttgttttgattattttagttttgtagtataatttgaagttagataatgtgatttttttagttttgttttttttgtttagggtagttttatttattttgggttttttgtgattttatatatattttaggattgtttttttatttttgtgaagaatgttattggtgttttgatagtaattgtattgaatttgtagattgttttgggtaggatggatattttaataaaattgattttttcggttgggtacggtggtttatttttgtaattttagtattttgggaggtcgagttaggtggattatttgagattaggagtttaagattagtttgattaatatggagaaatttcgtttttattaaaaatataaaattagttaggcgtggtggtatatgtttgtaattttagttatttaggaaagttgaggtaggagaatcgtttgaatttaggaggtagaggttgtggtgagttgagattgtattattgtattttagtttgggtaataggagtaaaattttattttagaaaataaaaataaatattgatttttttagtttatgaatatggaatgttttttttattttttgtgttttttttaatgttttgtattagtgttttatagtttttattggagagattttttatttttttagttaagtttatttttaggtattttattttatttgtagttaatgaaaatgggattcgttttttgattttttttttagattatttgttgttagtatatagaaatgttattgatttttgtatgttgattttgtattttgtaattttattgaatttgttttttagttttaatagttttttggtggagtttttaggttttttaaatattagattatatgatgtgtaaataaggataatttgatttttttttttttaattttgatgttttttattttttttttttgttagattgttttagttaggatttgtagtattgtgttgtataattgtagtgaaagtagttatttttgttttgttttagattttaaagaaaaggtttttagtttttttttatttagtatgttattagttgtgagttgttatatatggtttttattatattgaggtttgttttttgtatatttagtttttttagagtttttattatgaagggatgttaaatttattaaatgtttttttagtattaattgaaatggtgatatggtttttgttttttattttgttgatacgatgtattatattgattgatttgtgtatgtatatttggaatatattttatttggttatgaagaatgatttttttaatatattgttgaatgtggtttgttagtattttattgatgatatttgttttaatgtttattagggatataggtttgtagttttttttttttgatgtgtttttgtttgattttgatattaggatatttttggttttgtaaaatgagtttggaagtattttttttttttttgttttttagaataatttgaataggattgatattttttgttttttaaacgtttaattgtggtaaattatatattatataaattttattgttttaatcgtttttaagtgtatattcggtggtattagatatatttatatttttgtgtaatttaaaattttgtatttattaatcggtaattttttatttttttttatttttggtttttggtaattattattttattttttgtttttatgaatttgattattttaggtattttatttaagtagaatcgtgtaatgtttgtttttttgattttggtttattttatttataatatttcgaggtttatttaggttgtagtatgggttagatttttattttttttaatgatgaataatatttattatatgtatgtattatattttggttatttattttttagataatggatatttgggttatttttattttttggatattggtaaatattttattttttttgggtatatatttattttttttgagtattttttttgggtatatatttagaaatagaattgttggattatacggtattttattttttaatttttagaggaattattatagtgttttttattgtaggcgtgttattttgtatttttagaagtagtatataggggttttagtttttttatttttttgttaaatttgttgtttgtgtgtgtgtgtgtgtgtgtgtgtgtgtgtgtgtgtgtgtgtgtgataatagttattttgattggtttgaagtggtattttattgtggtttggatttgtatttttttaatgagtattgatattgagtatttttttatgtgtttattgattatttgtatattttttttgaagaattggttattgaagttttgtttattttttttttttatatagttttttatggttattttgtttatttttgagtgggttgattgttttgttgtttttgttaaatttttttgtatattttggaaattaattttttttttttttttttttttttttttttttttttttgagatggagttttgttttgttgtttaggttggagtgtagtggtacgattttagtttattgtaagttttattcgttagttttatgttatttttttattttagtttttttagtagttgggattataggcgttcgttattatattcggttaattttttgtatttttagtagagatagggttttattatgttagttaggatggttttaattttttgatttggtgatatattcgtttcggttttttaaagtgttggaattataggtttgagttattacgtttggttttttggaagttaattttttattagatatatgatttgtaatatttattttattttaggggttgattgtttttttattttgattgtgttttttgatgtatagatattttgaattttttatgagtttagtttgttagttttttttattttatttgtgttttggcgttatatttatgaaagtattgttaaattttatgttatgaatattatatttaatgtttttttttaagatatttttatgttttagtttttgagtttagagtttaggtttttgatttattttgagttaatttttgtatatagtataaattaagggtttaattttatattatttgaatatttagtttttttagtattatttgttgaaaagatggatttattttttgatattttgttatttgtttattttagtggatattagttggtttatttaattgttgttttggggttttgttatgttatttttttattttgaatttaagtttatattattgtttttttttgggatattgattttattataaatttttttagggttataatttttttattttttgtgttttatgattatttttttttttgtttttattatgtttatgatgagtttttttttaaggtagttcgttttgtttttattttatttttatttgtgtattatagttatattggatatgggtttttttgagtttgagtttttttttatttttattgttttttttggtaagattttttttttaatattgtttttatgttttttttttgtttttgtagggtagtttttttttttggtttttatttttttagggggtttgtggttatttagttttggtatttgatttataagtttgttatttttattttttttttttttgtttattagtttttttttttatttttttatttttatagttttttttgtatatgaaattttcgtttttgtttttttgtttatgtgtattttttgtttttttagggaggtcgggatagtagatttgtgtgttaaatattaatgtgaagttatttttaggaagaagttttatttgtgatttttttttttttagagttttatagttttcgttataattttatggtgttgttttaggatggatttgtgtagttagggtttttcgttgagggatatttggatggttagttttttttgcgttatgataggtagaaacgtagggtaaagttttagggatagtgggtagaagatgttttgggagttgagatttgggatatagagatcgaggatttgatagagaatgggtaagattttaggaggattttgatttatattaaggattagaaaggaggtgagagtcggtaggggtaagagtaatgggaggttttttttaggaaagttggagatagagagtagggatttgttttttttcgttggatttggttgggggtggggatgaggaatagggttagggaggtttagtagggtggtgagtcggaatttagtttatatagggaggtatggaggagggttagggaggggtcgtcgttgggttgagttttttatttgggtggaaaggtgatgggttcgggaatggagaagttattgttgggtgggggtaggtttgtattttttttaggagattagggtttgtgagatttatgaagatagtagtattaggggttttcggtatttttattataatggggagtttttttttttttaaaatttggagatttaagaatcgatagtgttttagttttttagagtttagattttggttatgaacgttataaatttttggaaggaagatgttatgaagattaagatatattatcgcgttatgtaggtagattgtttgtagaaattatagcgatatttgaaattcggggtggttattaggagaataggtatcgattttggttaggggttttattgttttcgtaattttgttagagttgtttcgttttttagttttgtttagggaaattttttttgtgttatggatgtaggcgttttttgttggtatattgtgttttgatttgttttttttgttagagttattggataaagatagtgggtttgggattgaattgtttagtgttgtaatttgggaaagtagtgggttttttgatagaagtttgagtttggggtgggagttaggtaggagaggaagtttttagggttagggttgttttttttgtttttcggtttgtttatttcggagagtttttttttggttttatgatttaggagtttatttttgatatttttttttttagtattaatgtggggattttagagtttgaggttatagttttaaggtttatttttttgttagtttggaggaattaggttttagggtgaggatagatttatagaaggtttgggatttgtgagggatttagttagagtgagaatagtggagaggagtagttttgttttttgtattttttttagaggggagtagggttttattggttttgtttttttttttttagtgttttttatggtgaatgttatttgtagcgaggttttagagggtaatattatcgtgatatgtagggtttttagtttttattttcggaatattatattgatttggcgttaggatggggtatttttgagttataatatttagtagtggggggatgttttgtttgatgggaatggaatttattagatttgggtggttattaggattcgttaaggagaggagtagaggtttatttgttatatggaatatagcgggaattacggtatttattttgtgttttttggtgagtttggggtgattttggagagggttaggttagggtaggaatagtagggacggttgtggttttttgtttagtgtataataagttttttttttttagggaaggcgttggtgttttagagttaacggatagattttttatatgtttttgttgttatgttatgttttgttattattattattttttgtgttttttgttgtaagaagaaaatattagcggtagagggtttaggtgagaaaaggggatagtttttggagatgggaaagtttttttttaggtagtagggtttttttattgtttttgtttagataagacgtaggtgataaggttgttggaataggggatggaagttggggtatttgggaggggaatgggagttgtatttttatttatatttataagtgttttttaagttagggttggggtaaggttttcgaatatttagttgtggtttttttttgttgtaagtgaggagtgggtagtagggagggttgtggtatttgttttgtttttattttagtttttttgtttttcgggtttattagggtgcgtttaggtggggtgagttgggaattacgtgttgattgttgagggtttggatgattatggtgttagagggaggaaatagtaaaggtggttgtgatttggggagggttagaaattggagaggaatttaaggagaggcggtgtttattcgtgtgttttttttaggaggtattttttaggtttttattatttggtttttttgagtttttttgtagatgatatagatgaatagataagtagatgtttttgggttatttgaggagcggggtttagttttttattagggtagttgtggtttttgtttttattttatttttagcgtgtttttttttgtagtttttgagggatatagtttttaggcgttatttttttgaggttttgttttgtgttttgtggttttattttgttttttttgagttaattttttttttttaaggtggttattgtttggtaagtttggagtaagggacggttagaagtattttttttatagttaggttgtttgatgggggatgaaaagagatagtagaagttttgtgtttttgtaaaaatagaggtagtgtaggggatagtgagaggttggggtgtttaggagatttgagtttggcggtaggggcgttggttttttatttttgaatttaattgtattgttagtcggttttttatgtttgagtagatgggaaggttcgttttttgttttgtagtaagagggttttgtttaggaggtatttatagtaggggtagtgtaggtttgtggttatttttgtttttatttgcggcgtttttcgtggagggattgttatttttggttttttgtgggtaggaatggttttttcgtaggttattggggttttggttaggaaaagggtatgaaatttatgtgttagtttattaaaatttttgtttttaatgttgatgtttaataaagatgttcgtaattttagttttataattttaataggattttttttaatattgttgttgtaaagtatattaaataaaataggaatttaaatttggagttttttttttagaagggtttgtgtggagatggtggttgtggtagcggtagtttttaggtgtagagggtgggtagaggtagttttaggttaaggggttttttttattttacgtggagaaaagtttttgtaggttgtaagggtagtggtttgggtggaatttttgttagggatagagtaggaaggtttcgtagttttattaagtagtagttttggggtgaagtaagtggattaggagtaagtggattaggtaggagtagtagtgatttaatagtaggttataggtttaggtgggtgttgaaggttatgggaggttaggttttttcgagtaaggtggggggttttagggttatgttaggtgtagattttgtggtagttatgtttttttatgttgggtttgttgggttttttaggttttttgatggggtttttagttaggagttgtttgtttagggttgggaggggaggagtgttgagttgtagatagagggtagggtttatagtgggtagggtttgttttggtgtgtaggtgtttttgtaggagaggagggtttggggattgagagtaagggttagggtttttttttggggaggttttttattgtaataggattggttaggtttgagaggagggtattgggtttttttttgggttttgtttttttgttttggggtttttttattttttgtacggtgagtggtgggtataggataggggttgatgttgatggagtgatgggagagaattgataggggttgggaaaagtaaggagggaggaagaaaaaagtgggggttttatttttttttagagaaagggtgaatttgattttggggtaattgaagagagaaaagtttttagggaataaatataatattgtatttagtggagtatttattcgttttttttttttttagagtttgtgagtttgtaggttttggattaatatttagttgggataggagattatagggatgtagtatagttgggattttagtttttgatgttagttattgggtttattggttttattgagggcgtttagattttatagttaggcggttaggatttaattttttgtttggattttattagtattttttttttgttttttgatttatgaaatagaaaataatattatttatttattgttgttggatgttgtaaagtgttagtaggtatgaggtgtttgttgttttgttacgtagagagttagtaaagggattatgattaatttaatattttattggaggttatatgattaaatagtaaattgtttattatgaatgtaggatgtgggtaaatttacgattgtttttgttaatagaaggtttgttgagggtatttattttatggtgtttattggagttatttattgggttatttagagtttattgtttgaggaatgtagttttataagtttattttggatttagtagttgatttttttttttatttttttttttgttattttttatattaataaatacgaagggttgtggaagattagagtttttgtttacgagaagtaagaagttttttgattttttgttttaaatatatttttttgtttttttttttatttttacgttcgttttttgtttagtttaatatagggttgtggggtttttaatagtgttatattaattggtattattatttttgttgtttttgtttttgtttttgtttttgtttttgagatagagttttattttgttatttaggttgtagtttattggtgtgattttagtttattgtaatttttgttttttaggtttaagtatttttcgtattttagattttcgaatagttgggattatagataggtattattatatttagttaatttttgtattttttgtagagacggggtttcgttaagttgattagtttagttttaaatttttgattttaggtgatttgtttgttttggtattttaaagtgttgggattataagaatgagttatcgtgtttggtttattttattatattgtaatatattttattatattagttattatgtttgttttatttttttatgttttaatatattttaatatattatatgtgtagtaattagattattatgggtgaattttatgagtgagtattttggtgatgattttttttgattagtttaggattagtttttttgttattttgaggttttttcgtttcgttatatcgttatgtattattttgtgtttattattatgtgtgtataatttatatcgtaaatgtttattttttaaatagatatttttggtttgtgttttattttatgcgtttgggagcggataaagtgtgaggtttagggagaaggagaggtttgttttaatgttttgatttagtattaaagtaattttttttttttgttttttttttttgttagtttttaatgattgatagatttatagtagaatagaaaggattgggaagggatggaggtgggatatttggcgttaatatttaggggttgattttgtgagggaatatttgttttgaagagttggagtttttatgtgatgatatagagatttttgttattgtatttagggaaaggattaagttttattttttatgtagggaggaggttttggttgtgattcggtttgtgggagaagtgaggattcgttttttttatagtgatagttaagaatttgtaggtgatagagaaggtttttttttaattgttttttattaggtttttttaggtattaaggaatagatttgggatattgtttttagtgatatgaatatatttagaagtgaggtggttttgttagggggttttggtgttgttatttgttttgggagtttagtgtttggagaggggtgtggagagtaggttttttgtaaaatagtaattatgatttataaattattttattttttattagttttttgttataaaataaaataggtatttaaaaagaaaaattgtttgaaaatgttgttttttaataataataataaataataataataaaagataaatattttttaattattagagatatagaagtttgttagttagtttagaaattattatttgttttagtttagtgataaaggttttttttttttatataaaattatagtttgatttttatgatgattgtttttttgttttattttatatttttattttttgaaattgtagtttagttttattttgggatgtataatttttgttttttttttttttttttttttttaagacggagttttattttgttatttaggttggagtgtagtggtatgatttcggtttattgtaagtttcgttttacgggtttatgcgatttttttgttttagtttttcgagtagttgggattataggcgtttgttattacgttcggttaatttttttgtatttttagtagagatagggttttattatgttagttaggatggttttaattttttgattttatgatttgtttgtttcggttttttaaagtgttgggattataggcgtgagttatcgtatttggtttgttttttttttttttttatgtttttttttgaaattttattgtttggttgagttttttatagtttgtattttgttggttttattttaaggtatagtttaatatggatttgttttatttgtattttttataaattggtagttggttatagagatttgtttatagattgatttgattttttttttgaatattttatttatggtattttattgtatttttttattaggaggaagaatttagtattggttatttatttttattttatttttaattgttattgttttttaatggttaaatttgttaattcgttatgggttgtaaaagaattatagttttagttttttattttttttttatttattagttgaataatttttaaaataagagatttatttttggttggatgcggtgatttacgtttgtaattttagtattttgggaggtcgaggttggtggattatttgaggtcgggagtttaagattattttgattaatatgaagaaattgtgtttttattaaaaatataaaattagtcgggagtggtggcgtatgtttgtaattttagttattcgggaggcggaagtaggagaattgtttaaatcgggaaggcggaggttgtagtgagtcgagatggcgttattgtattttagtttgggtattaagagtgaaatttcgttttaaaataaataaataaataaagtggagtatttgacggttatgggagagaatcggttataattatatatagtaagatgatgagtttagtaaagatgatgagttcgattatatgaaaataatttttaattttatttaattagaattaatagaatttatttatagtgttaaaaattaagatagtggttattttagggtgggggaggttggtttatgatttaacggtgttttttggagggtgaaaatgatgttgtttgatgaaggtgttgtttatttgagtttttatttgggtaaaatttattgtttatttgtgatttgtttatttttttttatgtatgttgttttttatttaagtttatatttttggtgttttgaaataattttttttaagttaatatagaattttttttattttaagtttttagaaatgttgtattgaaaatattagtgaattttttttttaattttaggaaataaatgttcgtgatttagatataaaaaggagaatttataagagtagtaggtttgggagttgatattagaatagttttggaaagggttgtcgagttaggaattaggaattaaaatttaaataagattataggaggtagagggtagaaattatgttttagtagtgtatgaatgaatgaattaagggtagtgatttatgggttgtttggttagtttggaatttggggaaaataaagttggaaaattgggggatggaagagagaagtgtgtattgattattttttatgggaagagtatgtgaagatagaggttgtatatggatgtttgttagagggtttttaaggggttggggttttttgtaattaggtgagcgagatggtttgatggatgatgttatttagtcgtataaggtttgtttatgagtttttgtataaagtggtcgtggtggttgggatggatattgtatggatagagtaattgagttattatttattaaggttgatttggtagttgttattgttgaggatttagtttgttaaaagtagttgtttttttgaatagagaaaaaaaatagataatgttaattaagagtaagatagtgttatgatagataaatatgttattgtagttatagtagagatgtaaataattttgaaattataaaaaaaaaaatgtcgatggaaaagatttattgtaagtaagaagttaaaatagttgtaaaaattttatttttgtttaattatatatagattgttttatagggaagttttattaaatttttaaagaaggttattggatttatttaaaatatttaagagaatggagtaaaatatagaaagttaggtaatttattttattagttatgaatagtgttaattttaaagttagttagggaataaataataaagaaataagatgggaaaattattattagtaattagatgtaaaatagatgagaaaaatagtagattgtgtttattagtgtgttataaataaattaaatattttgattaagttatgaattttaagaataaaagaatatttaaattttaaattttttaatgtattttaatatttaatttaataatttaaaaagagataattatattttattagatgtagaaattattgtagatgaaatttaatattatatttgatttatatttttttagttatttttatttttaagaatttgtgattagtgtagtattatttataatagtaaaggtaaggaattaatttagatgtttattaatagtggaatggataaagaaaattgcggtatagggttaggcgtggtggtttacgtttgtaattttagtattttgggagggtgaggcgggtagattacgaagttaggagttcgagattattttggttaatatagtgaaatttcgtttttattaaaaatataaaaaattagtcgggtgtggtggcgggtatttgtagttttagttattcgggaggttgaggtaggagaatggtatgaatttaggaggtggagtttgtagtgagtcgagattacgttattgtattttagtttgggtgatagaatgagatttcgttttaaaaaaaaaaagaaaagaaaagaaaagaaaattgtagtatttatatattatggtacgttatttagttaaaaaataagaacgaaattatgttttttatagtaatatggatggaggtggagattattattttaagtaaattaatgtaggaatagaaagttaaatattatatatttttatttataagtggtagttaaatattgagtatatatggatataaagaagggaataatagatattggggtttttttgagggtggagggtgggaggagggggaggattaaaaaattgtttattgggtattgtgttgattatttgagtaataaaattatttgtatattaaatattcgtgatatataatttatttatgtaataaatttgaatatgtattttttgaatttaaaaaattaaaaagaaaaaagtaaaaaagaatttttgattagattgagttaggataatggtcgggcgtggtggtttacgtttgtaattttagtattttgggaggtcgaggtaggtggttagggtaggttttttggaggagttatgtgagtagatttgagaaggagagatatagttatgtagatatttgaaggaagaattttttagtatttcgttttaagtatatttaggattttgttttggggtagattttaaagttgtagtggaaatggaggtggttatatttatagagattgtggtagagagtgatggggatttgggttttttttttttgttgtggttgttagaagtgttggagttggggagggaaaggtattggtatgtggaggaagattaggagaggaggggaggttgaagtgtgttttatttttattttatttttttgttttttattttttgtattcggtgttttttcgatttttttaaagttgtggtttttgataaggaggattttgagggtaattatattttgttatgtagagtatttggttttttatttgttaatattattttgatttggttgtaggaaggggaggagttaattttggatttaagatttaaggggattagatttaggaagatgagatatattagggttgggtagttgtggggggtttttttagagaaggtttgagatatatttgtttgtaggtgtttttgggtttggagaagttttttagtgtgattaggtgaggtgttgttagaggattagaggttgagggtggggcgttttatttagattttgtttttttttttgttttagtatttaaggttttttttttttttttttatggagatgttggggatgtttttattttttttttgagtatttatattttattttttatttgtttttttaattttttttttttttgttgtagtttttgttttagttttaggttttggtttttttttttttagttttattttttagggggtgatggtttatttttttttgaggagttagtattaggtgagaggttaggagaaggaaaagtttatgggttatgggttgggagggagaatgggtattgaaatggaagggtagggagatagaagaggtaggtatttttaaattattatttttttgttatggtttaagggtgttattttttttttaggtttagggatgtggaaagagtagtaggaattgggaaatattttataggaaagaataatgtgttttttttttttatcggttttttttttttgtttattttggttaattttttaagtgaattatgttattaaaatgtaaaatgtttattttaggaaagtttttaaatattagggaataaaattattagtgtttaagttttgtatattgaaaaatagaagttttaagaaataaagatttgtatggaaaattgtttattaattcggggaagttaaagtttgagttgaattagttttttttttttttttttttttttttttttttttttttttttgagacggagttttgttttgtcgtttaggttggagtgtagtggtatgattttagtttattgtaatttttgttttttcgatttaagtaatttttttgttttaggtttttaagtagttgggattataggtatgcgttattatgtttagttaatttttgtattttttagtagagacgaggtttcgttatgttggttaggttggttttaaatttttgattttaggtgattcgtttgttttagtttgttaaagttttgggattataggtatgagttattatgtttagttgaattagttttaaagtggtgttgaagtgagagttatttatgtgtttgtgtgagtttatataggttttgagatttttgtgttttttttagaagagtgaagtgagtatttagtgtttagattttggttgtgataagttattttttgataaaaggatttagggttttatagaaaaatagttgattttagggttggtataggaaaaatataaggtgagtttggaatattttgtaatgttagaaagtaatcgttatttattttttaatttttattattaaaaaataagggtatgttagagggatataggagttaatttgaaagagttttttatggataaagtcggaataattcgagtaataaagttataatagtattggattatgatttaaaatataaataaatatttattttatattgatttatttaattaaaaataattaaataaataaatagggaagaaggggtaaattttttttatagaagaattttaaaatatatattacgagaattttttttttaggagattggaattttattttttttattttgaatatgggttggatttgttgatttgtttttaaagattagagtatgaaaaaggaaaaataataattttatagtggagaaatgtagtagatattattaagtaattagagttatgttaatattttgttttttagaaatgatgtgatgaggatatttttttttatggtattttttttttaaatttataattttaatttaattataaggaagtattaggtaaatttaaagtgagggatattttataaattatttatttagtattttttaaaatttttaaggttatgaaaataggtaaagattgagaaatttatgattagaaagattagggagatttaaaagttaaatgtattaatgggttttggaaaaattggtgaagtttaaataaagtttatagtttagcgaatagtattatagtaatgttaattttttagttttttagttttgatagaattttgttagatgttaatattaaggaaagttggggtttatggaaattttgtgttttagttttgtaattttttaaatttattattgttattgttattgggtttttttgtttgttttgtttttgtttttttttgagatggagtttcgttttgtcgtttaggttggagtgtaatggcgcgattttagtttattgtaatttttattttttgggtttaagtaattgttttgttttagtttttttagtagttgggattttaggtattcgttattacgttcggttagtttttgtatttttagtagagatggggtttcgttatgttggttagggtggtttcgaattttcgattttaggtgatttgttcgtttcggttttttaaagttaaatttattattatttaaaataaatttaattaaaagtgaaatgaagttaggtatagtagtttatgtttgtaattttagttttttgggaggttaatttaagtttaggagtttgagagaagtttgggtaatatagtgagattttgttttataaaaaaaattaatttaaaaaatgaaatgaatagatatatattaaataaattaaatcgataattaataatatttagaaatagaaaatattagttttaaatgggtttattgataaattttattaaatatttaaggaaaaaattatattaattttttataattttttttagaagatatatttttttttgttgttgttgttatttagtgttaattttataattataaatttaatgttgtaatttagttaggtatggaagggaataaggaaaatatgaaatttaaagggaattgtagtgagagtataaagattttagatattgcgagtagatggatggagggtgtttttttgagttatagaagtaatggtttagtggttaagataaaatataagttaggtcgggcgcggtggtttatatttgtaattttagtattttgggaggttgacgtaggtgggattatttgaggttaggagtttaagattagtttgattaatacggagaaatttcgtttttattaaaaatatagaattagttaggtgtggtggcgtatgtttgtaattttagttattcgggaggttgaggtaggagaatcgtttgaatttaggaagtagaggttgtagtgagtcgagatggcgttattgtattttagtttggtaataagagtgaaatttagttttaaaaaaaaaatataagttaaatttagttaagttgtgtatagttagcgatggtgatttttttgatggttttgttatttttagattcgaagtgttttatggtttttataatatttatgttattttttattttgttaaagattatgggtttgttatttaattatttagttttggtagtgtagatgaaaaattgggaattgttcgggttaggtggtttatgtcgtaattttagtattttgggaggtcgagatgggtagattatttgaggttaggagtttaagattagtttgattaatatggtgaaatttcgtttttaataaaaatataaatattagttaggtatggtggcgtatgtttgtaattttagttatttaggaggttgaggtaggagaattgtttgaatttgggaggcggaagttgtagtgagttaagatcgcgttattgtattttagtttgggcgatagagttaagattttattttaaaaaaaagagaaaaaagaaaaatcgggaattatttgtgttgggtttagtatttgttatggataagatgttaggatttgtatgttttaggatgaagtttttattattaaattttttttcgtagatggatttgttattagtgttattatggcgtgtgaagttattattttgatatataaattttggaataattttgtgaaaggaggaatatttataattaaattttttttttttagtgtttagagtacgaaagttttttgttgtttttggaaatttgtttgtaaatagtttgaaggagatatagtttaagggtttattattgatagcgatgttgaaggatacggtggggttgattatggttgatagtatggggtttttgatggtggcgtttgtaaagttaagatagatattttttattttattttatgaggtcgggattttatgagggaatattttttaattaattttatgaggttagcgttagttaaatattaaaattagatgaagattttataaaaaaagaaaattatagattaatatttttaatgaatataggtgtaaaaatttttagtaaaatgttagtaaattaaatttataatgtatgagaagaataatatattatgtttaagtaagatttattttaggtatgtaaagttattttaatattggaaaattagttaatgtaatttattaaattaattggttaaagaagaaaattatatgattatattaatagaggtagaaaaagtaattgataatatttaatatttatttatgatgattaaaaaaaaaaaaattttttagtaagttaggaatagagaagattttatttaatttgataaataatatttataaaatttttatagttaatattatatttaatggtgagaaattaaaagtttgtttgttaagattagaataaggtaggaatgatttttttaatatagttttttaacgttgtattggaagttttagttaaagtagtaagataagaaaaggaattaaaaggtatataaatttggaataagaaataaaattgtttttgtttatagacgatatgattgtttatgtagaaaattaaaaagaatttatatataaaaaatttttggaattaataagtaattatagtaaggttgtaggatataaagttaatatgtaaaagttaattatttttttatgtattagtaatgagtatgtagaattcgttatttaatttttttttttttaagacggagttttgttttgtcgtttaggttagagtgtagtggcgcgattttaatttattgtaattttttttttttaggtttaagtaatttttttgttttagttttttgagtagttgggattataggtgtgttttattatgtttagttaatttttgtatttttagtagagacggggttttattatgttggttaggttgatttcgaatttttgattttatgttttgtttgttttagttttttaaagtgttgggattataggcgtgagttatcgtgtttggtttagaatttgttatttaaaatataatattatttatattagtatttttaaaaatgaaatatttaggtataaatttaagaaaatatgtataagatttatatgaataaaattataaaattgataaaagaaattaaagaattaaataaatggagagatattttatgtttatagttaggaaggtttaatattgttaatatatttgttttttttaatttgatttgtggaatgaatgtaattttaataaaaaattttagtaagttattttgtggatattaataaattgatttaaattttatatggtgaggtaaaagatttagttagtataatataggagaaaaataaagttaaagattattattatttgatttagattttttataaagttatagtaattaagatagagtggtgattagtatagttattgtgggaaacggtatggaggttttgtaaaaattttaaaaatagaaatattatatgatttagtaattttattaatgggtatatatttaaaggatatgaaattagtacgttgagatatttgtatttttatatttattgtattattatttttttttttttttttttttttttagagatagagtttatgttgtttagggtaatttttggttttaagcgattttgttgttttagttttttaattatttgggattataagtacgagatattgtatttggttgtagtattatttttaatagttaagatatagaatttatttaagtgtttattaatggatgaatggataaagaaaatgtggtatatataaaaaatggaatattatttagttttaaaaaataaaattttgttatttgtgataatatggatgaatttggaagatattatgttaagtgaaataagttaggtatagaaagataaatataattttatttatatgtggagtatagaaaaagttagatttataaatagagagtaaattggtggttattagaggttgggaggtcggggaattggggagatgttagttaaagaatataagattttagttaggaagaataagtttaagagatttattgtattttatggtgattaaatttaataataatatattgtgtattttaaaatagtatgagaatagttttaagtatttttattatatatatataaaatatgtatgtgaggtaatatatatattattaaattgtttggtttatttattttataatgtgtgtgtatgtatgtgtatatatatataaatatgatgtatattataaatgtataaaattagttaatcgaaaaattaattttagaaagatagagtggtattggtaaagaatagataaattgatttatttgagtagaatagagagttaagaaatagttttatataaatataaggagtaaagataatataataaagatagtttttttagtaaatgttgttggaataattggatagttatgtataagaaaaatgaaaagagtttttttaaaaggttattgtgaaagttatttgtgatagtaatagaaagtgtttagaagggtttttgatatttagtaatgtaattttttttattgtaatgtaatggttaaattttaatattttttagtttttatttttataagatttttttatagaggtaataatgatttttgttagttatttagttttgttaatttattgggtaggatataatattgaggggtttattagtatattggttttagggggttttgtagttttttgattttgtggatgatgttggttttaatttttttttgttcgtggttaaagataggttttttttgcggaggttaggttagaatgtttatttgattaagattttatattaagagttaggaataataaaaataataataaataaataaatatagtaatataatttatgtgttttagttcgttttttgtcgttataatagaataatatagattgggtaatttattttgttgtttttttagatagggtttttttttgtcgtttagattggagtgtagtggtatgatttcgatttattgtaatttttattttttagatttaagtgatttttttattttagttttttaaataattgggattatagattcgtacgattatattagttaatttttgtgtttttttgtagagatgggttttgttatgttgtttaggttggttttaaatttttgggtttaagttttttatttattttggttttttaaagtgttgggattataggtttgagttattatatttagtatagattgggtaatttataaagaaaataaatgttttttttatagagttggaggttgagaagtttaagagtatgatattggtattttatgagggtttggttgtagtattattttatagtgagaggtggaagggtaaagaggttgaattgatttttattatgttatataatggtattaatttatttaatttaattaattttgaaaggttttatatcggttgggtacggtggtttatgtttgtaattttagtattttgggaggttaaggtaggtggattatttgaggttaggagtttaagattagtttgattaatatgatgaaatttcgtttttattaaaaatataaaaattagttgggcgtggtggtatgtgtttgtaattttagttatttaggaggttgagataggagaattatttgaatatgggaggcggaggttgtagtgagttgagattgtgttattgtattttagtttgggtaataagagcgaaattttattttaaaaaaagaaaaaaaaaagttttgtattttaatattattaggatagtaattaaatgttaatacgagttttggtggggatatttaattttagtattaggtattttggtttatgtatttttttagtttaatttttttatttttataattatgagatttacgattatttattatatttggttttttttttttttggttttgttttttgttttttgagataagagtttcgttttgtcgttaggttggagtgtagtggtatgattttagtttattgtaatttttggttttcgggtttaagtgatttttttgttttagtttttcgagtggttgggattataggcgtgtattattatgtttggttaatttttgtatttttagtagagacggggttttattatgttggttaggatggtttcgattttttgattttatgattcgttcgtttcggttttttaaagtgttgagattataggtgtgagttattgcgtttggttttatttattatatttgaatcgatttaaaggttagtgtttttttaattaagtttttataggtgaataaagttaaaatttagattttattttatttatggtttagaattatttattgtgaaaaaaaaaaaaattagttattataaattattgggggttagtttatttagtttattttggagtttataatttaaagtagaaatttatatggttgaaatgttatttttttaaaggattgttattagtgtattatttagattgttttgtaaaagttttatttgttgttttttttaaatggttgttaattttttaaattaatagatagagggttaggtacggtggtttatatttgtaattttagtattttgggaggttgaggtagtcggattatttgaggttaggtgtttaagattagtttggttaatatggtgaaattttgtttgtattaaaaatataaaaattagttcggtatagtggtatacgtttgtaattttagttttttgggaggtagaggtataagaattgtttgaattcggtaatcggaggttttagtaagtagagattgtgttattgtattttagtttgggtgatagagtattgttttgtttattttttaaaaatgtagttaatttttttttttttttttttttttttttttttttttttttgagagacggagttttgttttgtcgtttaggttggagtgtagtggtataattttagtttattgtaattttcgttttttaggtttaagtaatttttttgttttagttttataagtagttgggattataggtggttattattacgtttagttaattttttgtatttttagtagagacggggttttattatgttcgttaggttagttttgaatttttgattttaagtgatttttttgtttcggttttttaaagtgtcgggattataagtatgagttattgcgttcggttaatttttaatgttaattagttgtggattgtttaattatatattgtatagtttcgtttatttataataatagtagtttggggtttttatattttaataattaagattttagttgtgtatatattgtaattaaagtatgagttatgtataattttattattaagatataagagggaaagttttttttttttaaaatttttataaaggttttgggttttttttttatttaagtgggaaaaagttagttaatgaggaacgtaaagtttttggttttatttaaaggtgttttggttcgtaagtgtgagaagtattgatcgttgggaagtttttattgtttggtttttggatttttatattatggtagaggttatttttttttttaatgtagagtgatatttagatagcgagttggttagtagttgtttattttttagtaattttgttttttggggtatggttttttaaggatttttttgtttttagatgattaaaattgggattagttatttttttttgagttatttttgtttttgggtttgtggttatgttatagtttagttataataggatatttttttagaatattttgtaggaagttgatatttttatgtagatttatatatgtacggtgtgtgtataggtttttggttttattttaggaggtgttgggggaggtttattagtttaatagaatttgaggttagttgtattagtgttatattttaggagttaaggttataagggatataaagtgtttagatttattagagaaggtaaatttttatagtatgtagggttagataggggtaagaaataaggttattttgggttagtaagaagagggaaagggaaatgataggtatatttcggagatattgaagatttgtttttagattatagtaataaagtgagttatataaattttttagttttttattgtgtataaaagttatgtttgtattatattgtagtttgttaagtgtatagtagtattgtgtataaaaaattgtgtatatatttaatggagtttcgttttgttatttaggttggagtgtagtgttacgattttggtttattgtaattttcgttttttgagtttaagttatttttttgtttagttttttaagtagttgggattataggtgtttattattatgtttagttaatttttgtatttttagtagagatgaggttttattatgttggttaggttaattttgaatttttgattttaagtgatttatttatttcggttttttaaagtgttgggattataggcgtgagttattgtatttggttatatattttaattttaaaatatttaattgttaaataaatgttaataattatatgaggttttagttaattttgatttttttgttgggggagggttttgtttttatggattaggggtatggttgttgaaggttgttttgataattttttaaaataagataatgatgtttgttatttgtcgtatggattattttttttaatattgttgtgttttagggaatagggaggtttggaaagtagagtcgggagaatggttagttggtgaagtagttataatatatatatttttttattaagtttgttgttttatatgagtatcgtttatggtgttttaaaataattataatagttaattttagtaattgattataggttattgtaataagtataataatgaaaacgtttgaaatattttgagaattttatagcgtgatatggagatatgatgtttgtttgttgttgggaaaatagtattaatagatttgtttgatgtgtttgatatagggttgttataagtttttaatttttaaataaaaaatagtatttgtaaagagtaataaagggaagtataataaaaggtatatttgtaaaggggaattagtatttaagtaaggttaggatgagtttttaagttaggtggatttagatatgaattttttaggttttattaataattagttgtggattttcgagtatatttagtttagagttgtttttaatagatatttttttagtgaatgttgaatgaaattatttgagttagtttttttaggtgtaaattagtgaggtaatttttattttgtagagtgaagtgagaaaatagtgttaagaaaaaggtatgtcgggtgcggtggtttacgtttgtaattttagtattttgggaggttaagacgggcggattacgaggttaggagatcgagattattttggttaatacggtgaaatttcgtttttattaaaaatataaaaaattagtcgggcgtagtggcgagtatttgtagttttagttattcgggagggtgaggtaggagaatggcgtgaattcgggaggtagagtttgtagtgagtttagattgcgttattgtattttagtttgggtaatagagcgagatttcgttttaaaaaaaaaaaaaaaaaaagatataagatttgtggtagttttttttttttgtttggtagtagttattgggtaaattaagatggtgtatataagtatatttagaagttatggaagaagtagtttgatgttatgagtttttttttgagggttcgttgttggtagtattattagttttttgttttttatagggattttcgttttatttagtttaataaagtacgttattgggttatagttaagtaaggttatgttatatataagcgttacggtggttgaaaatttagtttttaagaaggtaatttaatagtaagtttgtttattatggtgttaattagttagtttgtttaaagtttttagtttgttatagaagagtaagttggatgttattgtggggttttgagttttgaatttttattgggttggttaaagattttatatataaagtttttgaggttattttagttgatttattttataatattattagaaggaaatttgatatttagtggtttataataagtatagggagatgcgtaggttatttgtaggttaagagagttacggttttggaaagggttgtaagttttattatattattggtggttttcgttatgtagtttggagaaggtgtaatattttttagttttatagttatcggtaatgtttttaaaatttatatttaataaatattagattaaaaaaaaaaaattatagatttgtggtaggttgggtattagtgttttaaagtaagttttgtttaaattggtagggatattttttatattaggaataggagttgtttttggattttgtttggggttaggttgggagagacgtggggtagagtggggtaggggtaggggtagggttgggggttggggtttgggtagggttaggtatttaagtgaggttaagttttggagcgaattagtttttggtggtcgttggatagtttatatagttttcggttaggttattcgttatggttttttttttgttttggttttttcggtattatttttttcgtttttttttgtttttttggtttttggtattttagggtttttatgggtgttgtttttaaaattttaaagtaagtatggaagagtagattaattttagaggaaatgggaagatgacgtttttttttagggtaagtggtattataggtaggaatagagggtgtgagaatttatattggggtgtgggaaaaaaaaatttttaattttattttgtattattttatattatgtttatttttgtagttttttttttagtttagttattaatttttttttttattttttttagtttagattttagggttttttttttttattttatttttatttataatagtatagtttataaagtttttgaataggatttatttttttttatttaatagttaattattttttagcggggaggagcggttgattttttttttagtgattttatatttttgtttaaggaagttagttatagtttttgggttagggaattttatttgttttttttattattatttagaggtttatgtttaagataggaagttatttggtttttttagtataggtgtttttaaatgatcggtttaaaaacgaatagggaaggtggaattttttatttttagttatagtttgcgataaagttttttagggtttcggttttttgttttggttgatgtttttttttttaattttttgattagggttttgggatttatcgtatagttgagttggttcgagttgaagagttgttggagtagtagttggagttgtattaggttttttttgaagggtaggagggagtttgggaggtttaagttttggtgtttaagatttagaagttgaaggaatagatgaggaggtattaagagagttttggaggaggtgtttaagttttttttagtgtttatagtatttttcggtattgaaaatatacgtattatttattaggagttttgggattataaatattttagcgtttttttaggttagagaaagtggaagagattataaatcgtaggtaattggtaggtagtgggggagttagggttttgtagttttagttttatttttttttgattttatagtaggtagggtatttaggttttataggaatttattttggattatgttttaaaataattttattttaaatataataaagggacgaagtatttatagatattatagatatatgtgttttatttttagttttgttaaaaaaaaattttgataaattagaaatgggggtttaggagtggtggtgatgtaaaagatggaagttatggggtgggggttgttaggggtgggggtagtagtgttttttttatttttattttggtgtttttttttgaaggatagacggttatattttaaaatgggcgagttttttatcgtgtttgtttaattgagaagaaaacgtagtatggttagaataaggtatgaaaaggggaaagtgaggtaggaatatacggtatatatgtagatattggtgtattgtttgggtttagaggacggacgtgggggtgagggaagggatgtaatatgatgagagaagatagaaattttatataaaggttagaaaaatattttaatatagtattaaagattagggggtatgaattagttaagtgtttattatgtattagatgtttatgatttatgtgatgggatttaggataaatatattaaggaatagggaggatttaaagggttttatgagattagtatttattgtaggaggagatgtttattttattaggtagtttattaatattgattttaaagcgattttgtatattattgaggattttggtattatttttatcggatataaatgtgatagttaagtttttggtgttaaatcggtttgttttggttatttggagggagatagagggtagtattggaagatcgaagaggaaagagatttagaggtaggaatgaagatgtataaatagaaaataagggaatgggagagtgggatttttttagtttgtgaggtttattcgatgtaggtaggtgttagaatttttaggtatgttataattaaaagtaatgtttattcgttcgatgtttatgtttcggttaaataggttggtagttataagaattcgtcgttgaaaatttttaaattgttgatatcgagaaagtttttgtgagaaaggaaatttaaaatatgttgagattttttttttttaattgttttttttttttaaggatataaaatattttttttatttttagtttatttttttttttggggtattttacggtggatggtaatggttgggaagttttgttttattagtagttgggttaaggtaatgtatcgttgtatagattttataaagattattatttgttgtggggtggggtggggggtcgtaaattgggggaataggggtttatggtgtgtgagagatattacgtgggagaggggagtttttagtaattacgtttttaggaatttttttttattttttttatttttttattatatatttagagtagaaaaggaaatataattttattttagtattgatttttttttaaggaagttggtttttgaggtagtatagagtttagaaattaaaattgttagatatgttaggagatgaggatgagattattttatgaaaaagtgataaaaaattagaattaagatttggaggggtaattgatatttttgtttattaaaatattaaatttaagggagttattttaattttagaaagtagttttaaatgtaaatagattatttataagtatattaattaaatatttttttgagatggggttttattttgttttttagattggagtgtagtggtgtaatcgtaagttattgtagtttttatttttttgggtttaagagatttttttattttagtattttaagtagttgggattataggtgtatattattacgtttagttattttttttattttttatttttattatttgtagagacgggcgtttttttatgttatttaggttggttttgaagttttgggtttaagtaatgtttttgttttagttttttaaagtattgggattatgggtatgagttattgttttgtatttagttagaaatgttttttttgaataagtagttattagaggaattaaatatttaagaattttaatatgtttttaaatatcgttttaagatttttaataattttttaaaattttttaaggatttttggagataagattttattttgttgtttaagttggagtatagtagtgtaattatagtttattgtagttttaattttttgggtttaagttatttttttattttagttattagagtatttgggattataggtatatattattatatttggttaattttttttttttttggtagtgatgaagtttcgttatgttgtttagattggttttaaatttttggatttaagtgatttattttttttagtttttttaagtgttgggattatatatataagttatcgtgtttggttaaggattttaatttttgaagtttattttttttgaggttattgaggatatattcgtgttagttatagaatagaaaagtagtttttattttatttatgtttagtttttaagatatttatatttttattatttttttttatattatatatgtgatttttttaataaaagtgtatttaatatttaggtttttgttatagttggagtgttttaatgtttatttttttattggacgtttaattgatttggttgaatttaaggatatttagaaggttaaagagttttcggtttttttcgttgttttttagttttacgtagtattgttgtaatttatgtagcgttaatttcgttttattatttacgaagatttttattggttgggggggaggaagggggtggggaacgggaggagggtagagtgggggggttaaatttgggggggtggaggaagttgatttttaatatattttatggggggatggggaggaaagagaagattgaaaattttattttatttttaaaaatatttatattttattgtggttttttttatattatatttaattttttttttattagatgagttttaagattgtttaattaaaaattattatgggaaagaaattgtaaatgaagttaaggagtagtgaaattatttaatggtatagatgttattattttaaatagaggtgggagaggaaagaaaatgggagatgatttttaaagggagagtaaggattaaatatttgggaaatgatgggaggtagtgatttaaggttagaataattttattagaggtgtttttaagaatatggggtggggggaggataattgttttatttgatttttttattttaattaagagaatttcgtgtgtattagtaaagtggatgttttttaagattagaatgttgtaatggatagttaaaatgttatttaaggagaaataaaaattatttaagatgagttatttgtcgttagattataataggatagttttagatgagattggttttttgattaagaattaaattatttataggtttataggaaaggtattagtaagtggtgttaaaatattaaatttagagtagtagatacgtttttaagggataggattttattatgttgtttaggttggagtgtagtggttatttattggtataattatagtatattatagttttaaatttttgggtttaagtgatttttttgttttagttttttgaatagttgggattataggtatatattattatattttattgtatttatttttaaaattaaaaaattttttgaaggggaggaaagtaataaagatagaaattattataattttaaagtttaatttttttaatattttttatattattttgggggaagatagttaatatgaagatttagaggataaaataggaaaggatgtgtgtgttatgggaaaaaaattagaagtttaattttagaaggtaggttttgttttttgttttgttttgatatagggttttattttattatttaggttggagtatagtggtataattatagtttattgttatttttacgtttcgggtttaagtaaatttttttgttttagttttttaagtagttgggattataggtatgcgttattacgttcggtttttttggtagagataaagttttattatattgttttagttagttttaaatttttgggtttaagtaatttttttattttggttttttaaagtgttgggattagaggtgagttattaggtttagttaaggtaggttttttaaagagaagttttatggttttttttaaattttattttagttttaaatatagttaaagagtgattattttacgggaagaatattgtagggaggggaagaatatattttattgtttatgtaattggttttatttagttttaaattttaataattattcgattatatttattttattttttttatgttttttttttttgagtattaaaaaaaataaaaaaatttttttaagaaaaaaaatttattattttatttaggatatttttttttaatatatattgggggaaacggggtacggtacgcgttgggtttaggaaaaaaatcgggaacggaaaaagaggttggtttggtttttagttttttggttaggttttttcgcggttttcgttgtcgttatttatcgttgggtgtcgtttgtattttttcgtcgcgttacggtgtttttttgttgtcggtttatattaatcgaggttttagatgggtgtaaggagatgtgggtgggaaggagtagggtatcggggattgaggtgttaaaggtttttatttttggaggtggggaaggggaggatttatttgtgttgatgttttttttttggatatgttttgttatttgtttgttttttttttgtttttttgttatcgggaagtaggagttttggtgagtagaaggttttagttgtatgttcgatgttattttgagggtgcgtggttgtagggtgtatgtaagagacgatggatgggtgggtggtagggtagaaaaattttgttttttttcgaagggagaagaggtttaaaaatgttgtgatttatgaaaaagtcgaatattattcgtttttatattaattcgattaagtttttcggagtttttttggtattcgcgtaggttttaatattagttgtttttgtttttgtatgtttttttaaggagttattatttttagttgggtataagtcgtttttttggtatttgaatgataagggagtttgaggaagagggcgaggaaggggaggaggtagcgggcggggagtggagggagagaaggtagaagggtatttatattttgtatgaatttgcggtagattggacggatttttttgtttaaggtagtattgaatattatgatttgtttttcgtggggggttatgcgaaaaattttttggatatttcgacgtatgtttataagaataaggaaaaaaattgtaggagaaaataagtaggtatgataaataaagattagaggtagattttttagtgaggtgaagattgttggaaatagtaataatataatggaaagagtaatggatttggaattaagaagtgggattagattttagttgtttgttttaattaagtaagaaataaggtaaaattttaaagtttttaattatgaaatggggataaagtttagtgtagaggtttttaaggtttttaaaatatgttttatgggatttttttttaatttttttttgtttaagttttagttagtttttagtagattataaatattaagtatatattatattttagatattagagtttatttatgattttttggattatttttttattaagttaggtaaatatgatatttttatttggagtttatttttatagtttattatatagaattgttaaagattatttgtaatgatttatggggtttatgtttaattttatttttatttattaagatttaatttttatagaaaaattttttattaattttatttggtatattagaatattatattatataaattgttataaatattttttatattaattttagatttgagtttagatatttatttagttataaattttgattgtaaatgttgtgttggagatgttagaagggtattgtttttttttttagtttagaattttttttatgatttttagtatatgaatttataatgaaaacggtggtggtggtgatgatttatgtttaaaattattaaagttttttatttttaaaggttaaaaataaaaattatagaaagatgatagatgatattttttattgtgtttaaaagtataataaagattaattagggaatttagagttattagttatgggtgatagataagagtcgtttttgtattgaggtgtttttgttttaaataaatattatttggttttaaagaataattttttagtattagttaagttttagtattgttatttatcgagttgtttaagtattttattatatttatttaaaataaagtgtttaatgtgtttgaggttgaggtttttatttcgagttagggttaggatacggtttggagtttttacgacgatatgcgggtagtttttttttagtatttttttattttttttgatagatagattattaaaaaaaatagtaatttgtcgagttagaagtaaagagttttaaaatagaggaaggaaagagtttaatttttttagggtttttattttgtttgagttaaattaatttttagtatgtttttaaattaaaattaattttagaggttatttaatttaaaaattttatgttttttttattaaatattgagggtgattgtttaaagttatatggttagtcggagtagttaggataataatttagttttattgatttaatttaattaattttttttatttatgaggttaggttttatttaaaaaataaaggagttaggtgtggtggtatacgtttgtaattttagttatttaggaggttgaggtacgagaatttgggaggtagaggttgtggtgagttaagattttatcgttgtattttagtttgggtaataagagtgatattttattttaaaaagaaataaaataaataaaaataaaataaagttaggtttagtggtttacgtttgtaattttagtagtttgggaggttaaggaaagtggattatttgaagttaggagtttaagattagtttggttaatacggtgaaattttatttttattaaaatataaaatttataaatttattattaaaaaataaaaaatataaaatttagtcgggaggttgaggtaggagaatcgtttgaattcgggaggtggagattgtagtgaggcgagattgagttattgtattttagtttggatgatagagcgagattttattttaaaaaataaaaaataaataaataaaggatagtaagaaattattagattagtgtaaagtattataaaaaatatatggaatattaaggttttttaaataaatttagaattttaaattttttttatataaattttatgaaattattgtttcgggttaaatattattattttatgttaaaattattaggtgaatagttgtttggggatttgggttttggtatagtattaaataatattagaaattattttttggttttaagggggaaaagaataattgtggaattagattgttacgacgttaattttatggtaaatttaaaattattaatgaggttaggtgtagtggtttatttttgtaattttagtattttgggaggtcgaggtgggtggattatttgaggttaggagttcgagattagtttggttaatatggcgaaattttgttattattaaaaaaaaataaaaattagttaggtatgatggtatattgtagttttagttattcggggggttgaggcgggagaatcgtttgaacgtgggaggcgtaggttgtagtgagttgagatcgcgttattatatttatagtttgaaggatatagcgagattttattttaaaataaataaataaaaataaaataaaataattaatataagtcgattagatttgtggtataataggagatatagtattatttatgaaggatttttgttaaaaatgtttaattttaattagattttttttttttttttgagatgggagttttattttgttatttaggttggagtgtaatggtataattttagtttattataatttttgttttttgggtttaagcgatttttttgttttagttttttaagtaggtgggattataggtgtgtgttattatgtacggttaatttttgtatttttagtagagagagggttttattttgttggttatattggttttaaatttttgattttaaataatttatacgttttggttttttaaattgttgagattataggtgtaagttattgtgtatttggttagaatttttaatatttatatattattggagttgttttaaagttttcggttttttttgttatatattttaaaattattaaattgatatgatttaaagttagtataaagtagtaagaaaagggtggttttgtgttaagtattatttatagtttaattacgaatttttttgttatataggaatttaatattttgttatattatagtaaattaaagtttttttaaaattaaagagattattggtttataagttttttatttttttaatttgttatatttttatttttaggtttttttattttggtttattttgatattgggtatgtatttagagaagcgtttatattttttgttgatttgaaaagttaattttcgagtgtgatatattattagtatagatattttaggtaggaagtatacggagatatatggtaaatgtagttttttattattttttttagggaagtgattgttataaaaatatatttgggtcgataataaatgattttaattttgtgatttaaattatgaattttacgtttgcgatagaatattttttatagttgttaggttgttaagggtaatagaggttatgtgtttatggttttgtaagtattatgtagttaggataaaaatattttttttttatagttttaattaaaattttttttttagtattttttttaaatatatttgtttagtaattggttttagttgttgtagtgtggttaagataaatattgttgttttttttatgttcgatttggtttggtataggatatttatttttagaatggtttgagggatgtatttatgttggattaaaagttggggggggaggaagataaattagattttagtttttagataattttattttttttattatgttaagtttattttttattatttaatttttaaagtttagtatttatttggtttttgttaatttttagatttattttatttttttttgtttaattatatttattttaaaattagatttttttaattttttttagttttagttttttttagatttaggtttttttagttttagtaataaattttttgtatttattaatcgtttatttttaatgattttagttttgtttttattttttttaatttgtaataatttatgatatttgaatatttgttatagattattttttttgtttaggttgttatatttcgggttacgtaattattataattttggataaaatgaaggatttggtatttgatttagaagttagttatttttaaattagttatagaggtttttagagattatagttggtttggtttaatagagggagattataggtttaagtaggatttttttggaaatttaaaattagaagttaagtgataaaattaaaaataagtagataagaaaagttagttataagaatgaatggtagatttggaagttatttttggattattagtattttggtgttattacgaaagaaagaataagtttgtataagttttttttatttaaaattgtttttgatatttattttaatttttttttttttattgtcgtttcggttggtgtatagtggtgtaattacggtttattgaagttttaatttttatttgtttaatttttgaacgttttgtagagataggagtttcgttatgttgtttaggttttttttgtatttttgagtttaagtggttatttttttgttttagttttttaaagtgttgggattataggcgtgagttattgtatttggttttgatttagttttaagtataaatttttattattatttgagtaacgataaatatatttttgtattgtatttttaaagagtttaatgagtattatatgtttaagagaaaatttattttttgacggatgtttaaagttatagtcgataatggttcggagtaattttggtttgagtaggaagttacgaaagttagagttgtggatggagatataggagtttttgatattttttttggtaggggttttagttttattttttttagttgttgtttttattttattatttttatagtttaagagtttattgtttatatcgttttttgttataattgggtcggtaggggaagaagggaagggggatttggatgggttttcgtaaaataggtgaaaataaggggtgaagagtaggggattgaggaatagtaaaggaaaataaagatattatttttaatagaagagttggaggggggaaaaaaaaagtaagatttaattacgattttttttttatttttagtttttattttttttaaattaggaaatttttatttggaaagaaaaatagatataaaatataaaaacgaaaagtaaatataatagaatagaaaaagtagtattagggaaagtggttaggatagaggtttttaataagattagtaattatagtagcggaaattagaaaagttggaaggggaagattaatttataaatttttgatttgaaagtaatagtgaggaaatagaatagataataaaaggtaaaatatgattaataatttagtaaagtggaaaatggagatgataagtagagttttgaaaagtttttaaaggaagatttcgttttttttattataattttatcgttatggatgtttaatttagtagttattagttaagggtgatagatgagggttattattgcgtaaagcgtttatttttcgaaaagaaaatattatatggtcgtcgtttattttttatagtttttagttttttattttttagtattttttttttcgttgtttaagtaagttttgtgtaattagtatgggggggaggggcggtgtaagataaatggttcggttataaaaaaataaaatttatgtttttattttataataagaaagttaataggtgatagagaaaggtaattttcgtttaggttttaataggatttttattaagtggttttatattattgttacgttacgaaggtgagattttttttggagaaatatataatgatattaatcgtatcgtaaatatttggaaggtattttaaattaagttgggtaagttaaggtgagaaaaatttaattgggtttagaaattagtttttttttttagttttatcgagggtcgaaaaagagtttaagaaagaataaggaaggtgagaagagtttcgtttttcgtaaatattaagattaagggacgtcgagtatcgttttttattgatgttgaggtttttaatatgagaagaatttattggaagaagggagtaaaacgaatataatggcgtcgaggatattattttggattgggtttttttttagtttttttttttttttttaggagttttttgttttcgaaagggatgtaagttaaggaaatagcgaattaattaggttttagcgattagattatcgtttgtgaaaagggtattaggaatttatgtgacgggatgggtgcggagaagcgtagatggaaacggattgtagcgaaggttaaagtttatttaaatagggagagcgcgtatggcggtagtaatagcgacgaaggagggaaatttgtttttattttcggttgtaggtttttttttattttagtttttcgtttttttggttgtaagagcgtaggcgtaagggatcggaaatagggtttttcgcggttatatagattcgtgcgttttaggtttgtttttggaaaatgtttgtttgaaatttgttttaaaatcgtttttaattttattgttatcgttagtaataaaagatataaaggaaattaacgtttgttttttattgttatttttatttttttattttatttttttttatgttttttattttttcgtttaggtttttgttacgtaggttttttttgtaggtattttttcgtggatgcgcgaggaacgagtgtggcgaaggttgcgagtttttacggggtttttggttcggtagtgaaggtgatttgaggattgttgggtacgtattaggaatcggtaggttttagttgaggggagggaggagggaagttttagggaattggattgttcgggggtgtttttcgatttttttttagtcgtggggttggtgggcggtatttttttaaaaggatgttgttcgaggtagttgatgttttagggttagtgagttaggaaggtgttttgaattcgagcgggaagacggggtttggattcggttttaagtgttaatagtagggtttgagggttatattatattttattaatattgtttttgtttttgttttgagatagagtttcgttttgtcgtttaggcgggagtgtaatgttttgatttcggtttattgtaatcgttgtttttcgggtttaagcgatttttttgttttagtttttcgagtagttaggattataggcgttcgttattacgtttagtaaatttttgtttttttagtagagacggggttttatttatgtatgattttaggtgatttatttatttcggttttttagagtgttgggattataggcgtgagttatcgcgttcggtttattaatattgttaattcgagtagaatgtttttggtttcgttttaatagttttattgtttaatttggattttttttttgaatgaaatatttgttattttcgtttttgagatggggagttataaaagtaagatttgatgttttgttgtgtaataaaataataaacgtttggttttttttttgttagtatatttaattatttaatattaaggagtaggtatcgttatttttattttattgatagaagcgaagtaaagtaatatattttaagtagtacggttggtgaggttatagttaggatgtaaatattttttattttttattgtattttgtttttttgtttaaagaatttggttagtaaatatattgtaggttattttattggtttaaatttttggtgaagtaagtttgtttttagtgataaatgaagtaattaatttaagaatggtgttatagaaggtatttttttaagtattatttaatttatttaaaagtatttattaattgttttttttgtgttatatgttgttttaggatttggggatataacggtgaatagttttgtttttatagtgtttatattataggaaagaaaatatataaatataaatataatgttaagtatcgataagtggttagggtgtagtggtttaggtttgtaatttaatttttgaggaagtcgagttcgaaggattgtttgagtttaggagttttagattagtttgggtaagtgagattttatttttataaaaaattttaaaattagtaaggtatagtggtattcgttcgtaattttagttatttaggaggttgaagtgggaggattatttgagtttagggggttaaggttgtcgtgagttggaattttagtttgggtaatatagtaggattttgttttaaaaaattagtagtagtaagtgttatgaagaaaatgtaaggtaaaggggtaaagagtatttgtttttatattttagtttttttttatagttgcgatttatagtttttagatttttaaatgaggaattatgttttttattttagagaaataataaagtattatttgtttttgtttttttaagaagttttaaaggatagttatttgggttgtttagggaatatgtaaataaaaaataagaaagtgattgaaggttaggtatagtggtttatatttttaattttagtattttgggaggttaaggtaggtggattatttgaggttaggagtttgagattagtttgattaatatggcgaaattttatttttattaaaaatataaaaaatagttaggcgtggtggtatatatttataattttagtaatttgggaggttgaggtaggagaatcgtttgaatttgggaggtagaggttgtaatgagttgagattacgttattgtattttagtttgggtaataagagtaaaattttattttaaaaaaaaaaaaaataaagtgattgaaaatgagaaatgatgaggtaaaaggaggttgttttaatttattaatttatttgttaataattattttattgatattttttttattgttataatgggaaagtaaggtgttaaggatatagaaaggaagggtatgtatatgagggaatatagtattattttagattttagaaagtaatgagtatttgataagtttttggggaaataggaaaggaggaaaatttaataaagataaagattagtaaaagaaaaataaagagaggttataaaatgtagttatttatttggaattataagagaggggttaaatgtagttattttttttttttggagattagaaggtttttgggaaaagagaagaattaattttttagaaaataattagggttatagaatgaataagtggaattagagagttagtgatggacgtgaggaaatagttgtgtaggttttgattagtgagtaggtggtggtaatagtattatagggttgttatttattgaattattgttataatatgtaaggaattgtgttagattttatagaatgatttttaattattgaagtaatttttataaggtaggtattattattattttagttttatagaggaggatatcgaggttattaagttaagtagtttgttttggttttatagttagtaagtgatagggttaagagagggatttatatcggttagatattgaagttaggatgttttttatatttttatttttttatattataaattttatagagggtttaggtgagaatgatttggaagtttataaagttttagtgagggttaaagaataataaggagatttagatgtgagtaggatatttataagtgttataggaaaattattggattttgttttttaggatttttaggggatggaaagaagatagggattatggtgggaggtgattttgattggaggatttttttgagggagggaattggtagaaggagttaggttttacggtggttttaggtagaaattcggtagttggggtggatttggggtttgacgtcgtagattatgttaagaagttgggttaggatacgttttcggtttttttgttgggagttttgtatgttttgtatttggcgttttgtagtttgttttattttagtagataggtttttttgggagtttatggtttggggggtagggagaggggtggaagagagaaagggaaaagtaaaaatagataagggtttaggtatatgaggggaaagattttgaaataaagtttagaagaaaggtttttttagaaattatttttattttatagaaatattttaatattaaagagattaatatagttttttttttttttagatttaatatgtaattttattttaaaatagatcgtaatatttttattattttattatttatgattataaaattttattttttattataaatgttaattatattttatatagatgttatattttatatagattgtggtatttcgtttataagttttatgtggtttttaaaatttttagatttttttatatattattataaagttttattaatgttgtggtttttgttagggtttttttagttttagttttttgttattatatttttttgttgagttatttttatatattttattagatgtatttattaatttgtagtggggttttatttcgattttgttttaatttatcgtttgttgtttgttttggaattcgtgttttcgttttttgcggtattgttttatttttatttgtgtttttttttttgtttgttttagtcgtcgggttttttttggaggtagaagaaaggatagtgagtggggatggatttatatatatataatgtaatagtaggagttagttttttttagaaagttatatagtttttttttagttaattaggtgttagattttaatatttatttatttttttttttttaattagtttttagattttagttgttttttcgttagttttgggtttttttaaaatgtttgttgttttttatttttaattttttttttaaatttttaagggaggaaagaggagatttattttttttggtatttgttatttttttagttgttcgttttttagtttgtagaagttgttggatattttgggattgattggttatttttgttgttatggtcgatgttgttttgaatgttgttaaagtattagatggtttttattttttatcgtttatttttttttttttagttcgttgttgtagttttttattatttttgggttttagtgtttttttgtttatttagttttttgtatcgagtgttttttttaattttatttttttattgatgattggtttttttttttagtattttttgtttaggtagtatttaaaggggtcgtttgggagtagtagagattaggtttaaagttgcgggtttataataggttagttattttagtcggaaaggtttagggatgaggtaggggcggagacgggggagtattgaggtgagagaaggagaatttgattggtggtaatagaggaagtataaagggttgtgaatgcggtgaaaaggtaaggatgttattatgtaatttgtgttgggaaaagagtattttgggtttaattttaaattaattttttatttttttttttttttttattatttcgtttttttttttgtttttcgttgttaatatttttatttttttttatatattttttaagtttaaatttttgtattttatttgttttattttacgatagttttttttcgttttttgtttgtatttttttttttttttgatttgtttttgttgttgttttattgtggtttttgtttttgttttttatgtttaatgtgatttttattttgtttttattttttttattttttttgtttttttattttttcgtttattattgaattattttttttttttgttaagttagaggaggcgggaaaaaatttttaaataatttttttttttttttttttttttttcgttttttttttttcgtttttagtttagttttttggttttagacggtttttttaatttaagttttttagttttttttgggagatttggttaagaattattcggtcggggcggaacgatattcggtaacgttttttatagtttattttcgttttttatttgcgtttttgtttgcgttattttttttagtttggagtgttttcgtttttttcgtttttcgttttcgagttttttaaatataggttttgggtttacggttttgggggtatttgggggggcgggggtaggtttgatgagtaatttttttttttaggttttagaggaagaagtttttatatttgtttgtcgggtatatgatatttaatttttagattattattggagattatttgtgattttttaaaatttagatttttgttgataaaaattttttttattcggttttgttgggtttttttaaagttttttgttaaaaattaaaaatttatttgggtttttgagttttaaattaattatttatttttttttcgaattttatattaaaaaaattaaatttttgattttattattttttttaaaaaaaatttttttttaaatttattatttgataaaggattagggttaggttaggttttattttttgttgaagatattaaaaaaagacggaattaaagggagaaataataggggatgttagagatggagggagaaggattagttaaggttgaagttttgattgttgttttttttttttttttagtttaagagttttatggtttttatttttcgtcgttaacgtcgagaacgtcgttttcgtcgttatttgtttgtaggacggttggttcgggtttaggtttttttttagcgatatttaggtttcgatgtagatgttgggtagtttttattattgtatcgggtttgtgttcgttacgatgtttttgttttgtgtttgttgtttcggttcggggttgattttgtttattaggatcgttatggggatacggtattgtatgttgttgttcgttagggtttagatggtgagtttgtttagtggggaataaggttataagtagttgattagatttgaaatgaaagttaattaatagttgagaaataagttggttatttggttattaggatttagggaaggagttaattaagttggtatgtggttgttatttgtttttttatattattgagttattattgtttgaagaatttaatattttttaaagattaattggtttttaaattttatatttgtttagattagtagttattttgttttttgatagattgtttgttcgtagttaaaaagtagtatagaaggtaggttttggagttagattgtttggatttaaattttagttttaaattttagttttatattttatagttacgtatttttggataggttatttgaggtttagtttgtttatgtgtaaaaattaaaataataataatttttgttatgtgttagatattttttataaagtaatatatttaatttttataataattttaggaggtgagtattgatattattttttattttttagttgaggaaatagggtatagagaagttatttgttagagttatagttatttattggtagagtagagattataatttagatggattagatagagtgtttatgtttttaatagttatattgttttgtgttatatattatagtattgtatattgattgtgtttatgtttagagtatttatgttgtgttatatatgttttgagaattaattgatatagtatataattagagtatttggtatatacgataagtatttggtatatgttggcgattgttgtttttgtttttttgttttttgtttttgtttttgttttttatgaagttttattttttttgtttaggttggaatgtaatggtgcgattttggtttattgtaatttttattttttaggtttaagtgatttttatgcgttagttttttaagtagttaggattataggcgtatgttattacgtttagttaatttttatatttttagaagagatgggttttcgttatgttggataagttgattttgaatgtttgattttaggtgatttattaattttagttttttaaagtgttgggattataggtgtgagttattatatttggttttgtttttgtttttgttattaataggtttatatttttttaattataattttaaatttaaaaatattttgagaattaatattttttattaggttgttattaaaatttatttggtgatagaaatttaatttgaattaaagtaagattattatttatttttattttattgatgttaatatttatatatttttttgtagaaatatttatgtgtttggtttttgggttgtttaggtttttttgggttatttaatatagagtgagtgtatttttaggttagttttattaagttttaaaaatatttgaattttgtaaaatttttggtattgaaggatttaaatggggaatttggtgatattataatagtggtggaggttaggtgcggtgggttatgtttgtaattttagtattttgggaggttaaggtagttagattacgaggttaggagttcgagattagtttgattaatatagtgaaatttttatttgtattaaaaatataaaaattagttaggtatggtggtatatatttgtagttttagttatttgggaggttgaggtaggagaattatttgaattcggaagatagaggttgtggtgagtcgagattgtattattgtattttaatttgggtaatatagtaagatttcgttttaaaaaaaaaaaaaagagtggtggaagtagttttttataggtagagttttgtttattagaataaaagttgaaattttttttttttatttagagatttttttttggagtaagaatattataggaaaatttttagatttagatgaataattttaatattttttagtttaagtatagatagaaggttttttttttaaaatttttttaaatggttaaaaaattttttatttaaaaattttttttaacgtatttgagataggttagtatatttagatttgttttttgttgtttttatttaaaatagagtaggtttattgagtgtaggtatttaatttgatagtttatattgtaagaggtaggattttggaaggtaaaagagcggattatttcgaagtagatttgtatttagattttagttttgttattaatagggatatgtagtttatttttgtgagtttaatttgtttcgtaaaaatgggagttttgttttttgttttgttttgtttttttgagatggagtttttttgttgttgtttaggttagagtgtaatggcgcgattttagtttattttaatttttgttttttgggtttaagagatttttttgttttagttttttaagtagttgggattataggtatgtattattacgttcggttaattttgtatttttggtagagacggttttttcgtgttggttaggttggttttaaattttcgattttaggtgatttgttagtttagttttttaaagtgttgggattataggcgtgagttatcgcgtttagttaaaatgtttttgatagtgtggtagggattttttttattgtttgtttgtttgtttgttttgagatagggttttattttgttttttagtttggagtgtagtggtgtaattatggttt

(The sequence listing continues in the following parts.)
